United States Patent Application Publication US 2026/0242806 A1, published August 20, 2026 (application 18/876,631).

The application's sequence listing, which the Patent Office published only in electronic form, follows.

SEQUENCE LISTING (288 sequences)

SEQ ID NO: 1 - DNA, 33246 bp, Serratia entomophila
  primer_bind 1283..1305: note = primer pBAD33_lin_NheI_RV
  primer_bind 1286..1340: note = primer afp1_pBAD33_with_RBS_FW
  regulatory 1306..1319: note = RBS - Ribosomal binding site; regulatory_class = ribosome_binding_site
  primer_bind 13793..13829: note = primer afp_12500_RV_merge
  primer_bind 13800..13828: note = primer afp_12500_FW_merge
  primer_bind 29190..29240: note = primer afp18_pBAD33_RVlong
  primer_bind 29221..29242: note = primer pBAD33_lin_BamHI_FW
  source 1..33246: mol_type = other DNA
  CDS 1320..1769: note = Afp1
  CDS 1788..2852: note = Afp2
  CDS 2872..4227: note = Afp3
  CDS 4267..5517: note = Afp4 excluding STOP codon, overlap with Afp5
  CDS 5520..5966: note = Afp5 without STOP overlapping with afp6
  CDS 5969..6130: note = Afp6 without START and STOP overlapping with afp7
  CDS 6133..6816: note = Afp7 without START and STOP codon overlapping with afp8
  CDS 6819..8405: note = Afp8 without START MET overlapping with afp7
  CDS 8426..8845: note = Afp9 without STOP overlap with afp10
  CDS 8848..9267: note = Afp10 without START MET overlap with Afp9
  CDS 9344..11164: note = Afp11 without STOP codon overlap with Afp12
  CDS 11166..14051: note = Afp12 overlapping CDS with Afp11, start of coding sequence is 11160 missing START MET and SER
  CDS 14077..15987: note = Afp13
  CDS 16044..17651: note = Afp14
  CDS 17688..19778: note = Afp15
  CDS 19885..20736: note = Afp16
  CDS 20842..21918: note = Afp17
  CDS 22120..29220: note = Afp18
atcgatgcataatgtgcctgtcaaatggacgaagcagggattctgcaaaccctatgctactccgtcaagccgtcaattgtctgattcgttaccaattatgacaacttgacggctacatcattcactttttcttcacaaccggcacggaactcgctcgggctggccccggtgcattttttaaatacccgcgagaaatagagttgatcgtcaaaaccaacattgcgaccgacggtggcgataggcatccgggtggtgctcaaaagcagcttcgcctggctgatacgttggtcctcgcgccagcttaagacgctaatccctaactgctggcggaaaagatgtgacagacgcgacggcgacaagcaaacatgctgtgcgacgctggcgatatcaaaattgctgtctgccaggtgatcgctgatgtactgacaagcctcgcgtacccgattatccatcggtggatggagcgactcgttaatcgcttccatgcgccgcagtaacaattgctcaagcagatttatcgccagcagctccgaatagcgcccttccccttgcccggcgttaatgatttgcccaaacaggtcgctgaaatgcggctggtgcgcttcatccgggcgaaagaaccccgtattggcaaatattgacggccagttaagccattcatgccagtaggcgcgcggacgaaagtaaacccactggtgataccattcgcgagcctccggatgacgaccgtagtgatgaatctctcctggcgggaacagcaaaatatcacccggtcggcaaacaaattctcgtccctgatttttcaccaccccctgaccgcgaatggtgagattgagaatataacctttcattcccagcggtcggtcgataaaaaaatcgagataaccgttggcctcaatcggcgttaaacccgccaccagatgggcattaaacgagtatcccggcagcaggggatcattttgcgcttcagccatacttttcatactcccgccattcagagaagaaaccaattgtccatattgcatcagacattgccgtcactgcgtcttttactggctcttctcgctaaccaaaccggtaaccccgcttattaaaagcattctgtaacaaagcgggaccaaagccatgacaaaaacgcgtaacaaaagtgtctataatcacggcagaaaagtccacattgattatttgcacggcgtcacactttgctatgccatagcatttttatccataagattagcggatcctacctgacgctttttatcgcaactctctactgtttctccatacccgtttttttgggctagcaggaggaattcaccatggctattaccgcagacgacattgcagtgcaatatccaatccctacttatcgctttattgtgaccctgggcgatgagcaggtgccgtttaccagtgcttctggtctggatattaattttgacaccattgaataccgggacgggaccggcaattggttcaaaatgcccggccagcgacaggcccctaacattacgctgagtaaaggagtatttccgggcaaaaatgcgatgtatgaatggattaacgccattcaacttaatcaggttgaaaagaaagacatcatgatcagcctgaccaatgaagccggcacggaagtgctggtcagctggaatgtgagcaacgccttcccgacctcactgacctccccgtcatttgatgcgaccagcaacgaaatcgcggtacagcaaatcacgctcatggccgatcgcgtgaccattcagactgcctaatcaagaggacatgttgccatgactgtgacaaccacttatcccggcgtttatctcagtgaagatgccgtatcgagcttctcggtcaacagtgccgccaccgccgtgcccctgtttgcgtacgacagtgaaaataccaacaccattaataaaccgattcaggttttccgcaactgggcggaatttaccgtcgagtacccaacgccgctggaagacgctttttataccagcctgagcctgtggtttatgcacggtggcggtaaatgttatctggttaacgaggccaatatcgccgacgcggtggcgcaatacgatgatattacgctgattgtcgcggcagggacagataccactacctataccgcgttcaccacagtagtgggccagggctaccgtatttttggcctgtttgacggtccgaaagagaaaattgccggcacggcgaagccggatgaggtcatggaagaatatccgacctccccgtttggcgcggtattttacccgtggggcaccctggcatcgggggcggcggtgccgccgagcgccatcgccgcggcctccattacccaaaccgaccgtacgcgcggtgtgtggaaagcgccggccaaccaggccgtgaatggcgttacccctgcgtttgctgtcagcgatgatttccagggtaagtataaccagggcaaggcgctgaacatgatccgcacattctcgggccagggaacggtggtgtggggtgcccgcacgctggaggacagtgataactggcgctatatcccggttcgccgcttgttcaacgcggttgagcgggatattcaaaaatccctgaataaactggtgtttgaacccaacagccagccgacctggcagcgtgtcaaggccgccgtagacagttatctacacagtctgtggcagcagggcgcgttggccggtaatacccccgctgatgcctggtttgttcaggtcggcaaagatctcaccatgacccaggaagagatcaatcaggggaagatgatcataaaaatcggcctggccgcagttcgcccggcagaattcatcatcctgcagttcagccaggatatcgcgcaataattcactgaaggaaaagaacatggctactgtcacatctgtaccgggtgtctatattgaagaagatgcctcgccagcgatgtcggtgagcgcgagtgcgaccgccgtgccgttatttgtcgctcgttttacccctctcaagccagaactggcgggcgtgatcacccgcatcggcagctggctggactataccatcctgtttgacagcaacgtgccttcttccgcacgcgttaccgtgtcgtcaacggcggttgaaccgtcccctgaattcgatgcgctggaaacagcgtcgtctaaagcgacaacgacatatacctaccagattgatgatactgaggtcgtggatccgacggcctccgtcgccctgcggctctatttccagaacggcggcggcccctgctacctctatccgctggaaaaggcagacgataacggcccattggccgcgttgccggacctcatcgacgaggtcggggagatcacactgctggcaagtccggatcccgatgagacttaccgtactgcggtgtatggcgcgctggctgcctcactagatcagcacaaagggtacttcctgctggccgacagcgtcaatggcgacgcgcccagtgcggtcggtggttccgcccaggtggcggtgtattacccgaatgtagaagtgccgcacacccgtaaactggatgacgcagaggttgccatcgacggttacctcgacgatgaaggaaaggctgtcaccacactggctgcgctccgagtcgttaacactgaatttgccggtgaaattgcgcaatccctgtccggtgacctgagtgcaccgctgtcgcttccgccttcagcattgattgcgggggtgtacggcaagacagacggtgaacgtggggtgtggaaagcgccggcgaatgtggtgctcaacggcgtcagcgatgtcagcgtccgggtcaccaatgagcaacaggcggagctgaacccgaaaggcatcaatgtcattcgtcatttcagcgatcgcgggctcgtcgtgtggggtagccgcacacagaaagatgatgatgactggcggtatatcccggtgcgccgcctgttcgatgcggcagagcgcgacatcaaaaaggccctgcagccgatggtgtttgaacccaacagccagctgacctggaaacgggtgcagacggcgattgataactacctttaccgcctgtggcaacaaggtgccctggccggcaataaggcggaagaggcgtattttgtgcgcgtcggtaaaggtatcaccatgacacaagacgagattaaccaggggaaaatgatcattcaggttgggatggccgccgtgcgcccggccgaattcatcatccttaagtttactcaggacatgtctcagtaaagggggcccccctttccgactctttataaggatactgtgatgactatggttcttcctggggtttcgtacaatgaaacactgttaacgcaggcgtcaaacgacgatccggtgacgatgcccctgtttattggttatacccctcctgatacggcgataccggtaacggtgatgcagcccgtcagcgtgggatcactgacgcaggcgaacagtctctttggacagcgtgggacgctggcgtattccctgcgccatttctttgaaaacggtgggctgcagtgctatgtgctgcccctcgggccagggaagggagaacccgccgcgcgtctgcaagagttgattgccgcattacagacaccgcagatgctggagacgctgttagcggatgataagaccggcctggtcctggtaccggagctgagtgagctcaatgaggtgagttcgacctcgctttccgccgagggggttgacgcggccgaggttgacgccgatgccctttggtatcagggctggcaagtattactgacgctgtgtcgtcaggccccgcagcgttttgcgctgctggaattaccggaggatccggcgtccgcagtgacgctgacccaacagtctttttcagcagaccagtgtcagcgcggggcggcctggtggccacgcctggaaaccagttaccaggacgagtcgtcggcgcccgtggtgttgtcacccctgccggccgtcgcggcggccattcagcgcagtgcccacgataacggggtctggaaggcgccggccaacatcgcgttggccaaaacccgccgcccaacccaaagtatcctgacgtctcaggcattactggataaccagggggtgtcctgcaacctgatccgcagttttgtcgggaaaggcgtgcgtctgtggggatgccggaccttgcttaatgaggagaacacggcctggcgttatatccagatccgtttactggtcagcagcgtggagcactacctgagcaaattggcgcgcgcttacctgtttgagccgaatacggccccgacctggatgaaattaaagggccaggtctggacgtggttgcgtcagcaatggctggcaggggcctttttcggcacggtggaggatgaggccttttcgctcagtatcgggctggatgaaaccatgacggaagacgatattcgccatggaaagatgatcctgcaggtacgtctggcgctgctggcccccgcggaatttattgctatcagcctgacgctggatctgcgcgacggcacggccagcgcgcaaaccggaggtcaatcatgatgagtacacccgcggtatcccatcgttttctcgtcaattttttatttaacaacatacccaatccgtttgatatcgcgttccagcgcatatccggcctgtcgcggacactggaagtgagccagcaccgggaggggggcgagaatgtccgcaacctctggctggccgagcaggtgaatcacggcagcctggtgctggagcggggggtgatgaacgcctcccccctgacgctgcagtttgaccgcgtcttgcgccgggaaagcacgcagtgggccaacgtggtgatcatgttgctgaacgagctttcattaccggtgaccacctggacgctgagccatgccctgccggtgcgctggcagatgggcgatttggatgccggcagtaaccaggtgctcatcaacacgcttgagcttcgctatcaggatatgcgcatgctgggggtaaaactatgaccgtcgaaattcgtgagttgatcgtccaggttgaggtcaccgagcctgccccttctgccccgtccttaccgtttgcgcagcaccgtgagtgggacgatcagcggtgggtggagaggattaaacaagaggtgctggaacagctgcttgaaagggggtgtctgtgagcttacttgaacggggtttatcgaagctgaccctcaacgcctggaaagatcgcgaagggaaaatccctgcgggcagcatgagcgcgatgtataacccagagactattcagctggattatcagacgcggtttgataccgaagacaccatcaacacggcgtcgcaaagcaaccgctatgtgatttccgagccagtcggcctcaacctcaccttgttgttcgacagccagatgcccgggaataccaccccgatagagacgcagttggcgatgctgaaatccctctgcgccgtggatgcggccaccggatcgccttattttctgcgcatcacctgggggaaaatgcgctgggagaataaaggatggtttgccggccgggcccgtgatttatcggtcacctacacgctgtttgaccgtgacgccacgccgctgcgggccaccgtgcagttaagtctggtggcggatgagagctttgtgattcagcaatcccttaagacacaaagcgcccccgaccgtgcactggtcagcgtaccggatctggcctcgttgccgctgctggcgctcagcgccggcggggtgctggccagcagcgtagattacctgtcgctggcctgggataacgatttggataatctggatgattttcaaaccggggattttctgcgggcgacgaaaggggaggaggtatgagccacatcaccctggacatagcgggacagcgcagcacattggggatccgtcgtttgcgggtacagcagcttattaatgagatcccgctggcgcagctggagctgcatattcccacggataatcatggcgcagcggataacgcggtacaacacgaagtcagtcgtttcaccctgggcgtccgcgtggggattgcacaggataacaagccgcttttcgacggttatctggtgcaaaagaagatgcaactgaaggggaaagaatggtccgtgcggctggaggcccgccacgcgttgcagaaactgacgttcttgccccatagccgggtatttcgtcagcaggatgacagcaccgtcatgaaggggttgctgcagtctgcgggggtgaaactgacgcaagaatcggcggcgcaactgagcagcaagcacgatcaactgctccagtttcgtctcagtgactggcagtttattcgcagccggctcctgtccaccaattgctggctgctgcctgatgccgccagcgacacggtagtgatccgcccgctgtccgacgcggcaatggcctcacggacgcttgctcgcgacagtcacgactatacgctgtatgaaatcaatttgaattttgataaccgctttaccccagacagcctgtcactgcagggatgggatattgccgcacagcggctcacggcggcgcaaaaaagcccggccggcgcgtttcgtccctggaaacctgcaggtaaggttggccagtcctccgccgggcggcaagactacgccctggcgttcagcatgctgcctgaagctacgctgcaaaccctgtcgaactcctggctgaactatcaacaaatgaccggcgtacagggccacattgtgctggcggggacccgggacttcgcgccgggcgagagtatcaccctgagtgggtttggggcggggctggacggcacggcgatgctgagcggggtcaatcagcagtttgatacgcagtatggctggcgcagtgagctggtgattgggctgccggcgtcaatgctggagcccgcgccaccggtgaggtcgctgcatattggcacggtagcgggttttaccgccgatccccagcatctggatcggattgccattcatctgccagccctgaatctgcccgattcgctgatttttgcccgcctgagtaagccgtgggccagtcacgcgagtggcttctgtttttaccctgaacccggtgatgaagtggttgtggggtttatcgacagcgatccgcgttacccgatgatcctgggggcgttgcacaacccgaaaaataccgcgccgttcccaccggatgaaaagaacaatcgtaaggggttgatcgtgagtcaagccgaccagacgcaagccttgatgatcgataccgaagagaaaacgctgaggctgatggcgggggacaataccctcactttaaccggcgaggggaaccttactatgagtacaccgaacgccctgcaattgcaggccgatacgttgggtctgcaggctgacagtaacctgtcgattgcgggtaagcagcaggtggagatcaccagcgcgaaaattaacatgaaaaaataacctattacggtgaggttgctatgagtaacgacattttgaaagcgaccctggggcaatgctgggcatttccaccgcggttttcccccgacacgggcgtgtccctgacggcgggcgttgaggcagtgatgcagagtctgcgcgtgctgtttatgactgaaccgggcgaacgcattatgcgtgagagctatggcgggggtatgcatgactttatctttgagaatatcaccgatgaactgctggccaacatccacaaccgcatcgaagaaagcattctgcgccatgagcctcgggcgctgctcaaggacgtcattatccagccggacaaacaggaagcgagtcgtcttcgggcgcagatcaccgtgtatctggcaggctcggatctggtcgagacggtggacggtacgctgaacattcatgacggccagacgctgaggttactatgagcaacctggtggtcatcgacggtgacgcgctgacattcaacccgcagtttggcgctattacgatcacgccaccgccccagccacgaattagcggcagcggtgaggccagcatcggggggaaaaagatctgcattgttggggatgaaaagcaggtctcctttaccgttgactatatcaagcctccctttgtcgcttccccgggaaaagggacgctcaccatcaaagcgttggcgtccgagcagcgggctgagtttgcgacggcaccggcgccgatgattgtggtcggcagccagtttacgacgcaatttcagcccacaacaccggcccaggatccacaaggaaaaccggatacggatctgagtgctgtcaccggggttgggacatttatcaacagccagtcgtttgtcaccgccgggtgagtcatcgtgctgccgatagggcggaaacgggctcctgcgtgtcttctttatcatcacataaccaatggacaacattatgtctgacctggagcaactgaaacagatattgggcaacggattaacagaccagaccttcctgctggagccacggacagggaaggggctgctcaatctgatggcaaaatataccgaagccgtgccgtttgccggccataccgacgctgactggaaagacttctggatggccggctgcacgctggaagcgctgagtgacatctatcagtaccccgggctggcagagaaaaagctgccggtgcagcaggcgttcctgctggcgttgctgcatctgctcgaaacgcccagagccatgctgaacacggtgccggcgcggcaccgttcactttactaccgggatttattggggtttgccccccgcgccccgcagccggacagcgtggcggtgagctttacgctgcaaagaaattcgtccccgtatgcgttacccgccggcagcctgctggatggcggccaggacagcgccgggaacagcatcacctatcagactgacgacagtctgctgatcaccggccagcaactggaacagttgtgctggacagcccaggttggggagacgtggaaacggtataccgccatcgacagcgcgacgggcgttacgctaccggctgaggggctgcgtctttttaccgcaacaggacaggggaccgacaccaaagagaaggcccccgagctttatctggggttcagcgggacgtctgcgcaggacaccctgtcgctttactggtctgtgcgcgcctcatcggcgctggatgtcacctggtggtattaccaggggaccaaatgggcctcgctggatgccgagctgcaggacaatacagcgtccttgtccgtcagcaacctgtggcgggcgcggctgccggcagacagtcagccggggagcggtctgccacaggacgacgagccgctggaggccgggtattactggatcaaaggcacgctgaaagaaaataaagaggcaaaggacgagaactcgcccgccgaggccatgccgcaactgcaggccgtgctggccaatgcgatgaccgcgaccctgaatgtggcgcaggcgattgatgacagccacttttcccagccgctgccagccaacacgatcaaccagcttgtgacgccagttgccgccatcagcgacgttcgccagcccctgccctcggtaggcgggcagccacgggaaacggagatggcgatgttgcagcgtgccgcgccccggatagcccaccggcagcgggctatcacctggaacaatatgcgcagcctcctgatggagcactacccagagatttttgatgtccgttttcccgatgtggacaaactgagtcgtctcccggcgcttgaggtgcaatcgctgatggttatccctgacggtcgttatggtgataacgatgacgcgctgcgcccggcattgagtaacggaaggttgagccggatggcgcaatggctgtcgcagtacacttcgctgtgggcggcgccgacgctcaagaacccgaaatatatcgatgtgacggctcgctatcgggtgacgttcgtggtggggattcgccctgattatggttatcgtcagctcgcggcgcagttacaacacgactatatgccctgggcgaccgatcgacgccaggcggtaacaccgggcaatcaggtggactactaccagctgctggccacgctgcaacagtcaccgctggtgcagtccgtgaacgcgctggttcttagtcacgacgttattgatgaaacgggaaaacccacatcgatggaaacacaaagtaccgtcaccgccagggatgatgaggtcctgattttgtgcccggaaggagagacccatgtctaaagaaaacgccctgttcccggcggtgaaagacgcgattgtgtttgatgcgctctggcaacaggctcacgagaaagtcactgcgctcagtggtgagatctggacggataccggcgatcacgatccgggcgtcactctgttacagtccgcgacttggaactgttccgacctcagttaccgcgcgtcactgtcgctgaatgacctgctgacccatcaagaccagagcaccttgttcccggaagagttcggtcctgaacaggtgcttacctgtaacacggtgacggcagaggattaccgccgggccttactggacgtgcacagcagcgacattcaggccctggacacccctgagcaggattttttattcagcgatgtcagcctgactcaagaacctaaagagcaccgttttcactggtggtataacgcggaaaaacgcgaatacagcttcaggaagccgacagacagcggtgaagtgaacgaattgaaactgcgggggaatctgtggctttcgctggtcccgacccgctatacccagtccctgtcgcccgagaacctggcggcagtggagcaatgcctggctgagtttcttgcggcgcaccgtaatcttggcgaagtggtgtctcgtattacctggctgcaaccggcgacctttagcccgcggatgacgattgaactggccgataacatcggcgatatcaatcaggtggcggcgcagatttatcaggtcactgacgcgtttttgcgcccggcggtcgcccgttataccaccgaacaacggcgtgcgctcggtgatgccgatgacgccatctttgaggggccgaggctgaaacacggctggcagcaaacggcaccctcgcagatcacctccgggggttacgtcctcaacctcggcccgctggtgaacctgttgctggctatccccggcgtggccagcctgagcaccttgtctgtcgataaaggcgatggccacattacggccgttaccggggacaacttgcgctggcaagtggctgacggctattaccctctgctgtggggggcgccgccgctgagcctgctagcgggtgacgatagtccgttaaccctggtgtcgaaaggcggtattcgcaacacgctggagagtgaggcgatggcgggttacctgacacaggcagacctgatcgtcacaacgcccacggtgttacccgccggccgctttcgtgatcagacgctttatattcccatcgggcagcgtcagcccgaatgctatgccctgcagcagcccgataccgtgattgacgaccagacgcgcgcggtgcatcagtttctgctgcctgtcgaccaattgctggccgacggtacggcagagctggcacagctgcctaccttactggcatttaaaaaccgaggcgacgccattcgggggacccgctggccctatacgaatgcgatggtgcagcaggctattcatcagccctacgcgaaaacgctggaagcaattgcgcagcaggatgcggctatcttcacgcaggataagcagcctgttgggggcaattatgcccgcgaactggattttcttcagtatctgctggggtattttggcacccagcgggccgccctgccgctaacgctggatttgcctgattttctggcgacgcagcgggcgtatctggcgcagcaacccgccttaggttacgaccgcatcaatatccgtattgaccaggtttccgccctgcaaaagcgtattgcggcgcgcatcggccttgacagcatctgctttgctgataatccggacctgggtcaactgccattttacctgattgagcatcgtcagctgctgccccagaccccggacagcacctttgacagtgaacagaccccgtccggttttgcggtggccgaacccgacattacgctgacgcaggcgggcagtgtcggcaaggtggtccaggggcagcttatcgaccttattgcgattgaagggggcagtcgactgcatgtcagccggctgctggttattaaggccgagggggacagttttaccgtcagcacggaaaacagtcagcaactgcacaacaccctgtcacggcttgagacggcctgggcgagtcacaacctgcgctggcaaaacagcaatgtctggctgcaggatatggattaccggctgaattatgctgaggcaaaactgcaaccggctaatccacagcagcgcttactggcgagtaacgcgcaatccccgtatcccgccatggtcagcgtcggtgatggcattgtcctgcgccccgcgggcctacagttttacatgccgggggcaaacgccacccgtgctgccactcttgatgctgactggcagcttgcggcgaccgttaaagcggtcgatccgattgcgggcacgttgcttatcgaaaaagcggccggcagcacagaggattttccctcagcggagagcagcttccgctaccagtgggcgtttagccaggcgaactatgcgacgacagacaggttctcttttgtggtcagcgcggtgctcaatcgccgtctgatagagaaccccaatatcgtgcctgagcagctggttgcctggatacaggaaaccattatggcggagttcccggcccacgtgtccctgattaatcactggcttgatgacgccacctttaacaactttggggtgacctattcgcgctggcaaaacagtggcatgccgctgggcgatgatgcttttgcgctgatgcaaatactgaccctggggcatctccctgttacccaactggacatcggcctgatgcgcatcgccaccgaggagcagcgcaccgaggttatcggtgacggcagccagtggcatgaagacgttattctgcgagaagagctgttctacgtgccgaaagacgtacaaaccaccctttaacatcatgacgaatctggagagcaaaatgacggacaaaacccctaagaaaacggcagaaaccccagtgaatacccaggcgaccttagccgacacaacggacacagcgcgtgacagcgagccaaagagcagagccttgccccaggccgatgcgctgaaggcgcgctttaaggcgggcagtattccgctgcagacggactttgcggacctgattgatctggccaatatgggacgtcaggcggtgggcggagcagaggggcaaaccgggccggcaaatgggtttaccctttcatcggagggccttcttgaattaaaacccaatgcaactaaagggattgtggttgataaagacggcattgccgtcaaggcagaggcaagtaaggggcttcaggtcaccagcaacggtgtaggcgtacaagccgggaatggcgttgcggttaatggtagtggcgtgaacgtaaaactggcgaacgggactgctagcgtcactacgggtaatgccggcggattgacgttagctgcggcgggcttatccgtacaggccgggagtggtattagtgttgccaacaccggcgttgccgtacaggccgggaatggtattagtgttaccagcactggcgttgccgtcaaggcggaggcaagtaaggggcttcaggtcaccagcaacggtgtaggcgtacaggccgggaatggcgttgcggttaatggtagtggcgtgaacgtaaaactggcgaacgggactgctagcgtcactacgggtaatgccggcggattgaatttagctgcggcgggcttatccgtacaggccgggagtggtattagtgttaccagcactggcgttgccgtcaaggcggaggcaagtaaggggcttcaggtcaccagcaacggtgtaggcgtacaggccgggaatggcgttgcggttaatggtagtggcgtgaacgtaaaactggcgaacgggactgctagcgtcactacgggtaatgccggcggattgaatttagctgcggcgggcttatccgtacaggccgggagtggtattagtgttaccagcactggcgttgccgtcaaggcggaggcaagtaaggggcttcaggtcaccagcaacggtgtaggcgtacaggccgggaatggcgttgcggttaatggtagtggcgtgaacgtaaaactggcgaacgggactgctagcgtcactacgggtaatgccggcggattgaatttagctgcggcgggcttatccgtacaggccgggagtggtattagtgttaccagcactggcgttgccgtcaaggcggaggcaagtaaggggcttcaggtcaccagcaacggtgtaggcgtacaggccgggaatggcgttgcggttaatggtagtggcgtgaacgtaaaactggcgaacgggactgctagcgtcactacgggtaatgccggcggattgacgttagctgcggcgggcttatccgtacaggccgggagtggtattagtgttgccaacaccggcgttgccgtacaggccgggaatggtattagtgttaccagcactggcgttgccgtcaaggccgggaatggtattcaggtcaatacgaacggtgtggggctaaagagcaccgcctggataaacgtgatgtgtggacttcataatgccactttctatgtgtacagcagttacttttgcgcattcttttgtaattattctaatggctgcgttgcatatgtatacggtcgaggagctttttatctgtccacagttagtggtgatatcaaattgaattcagtctctcccaatcaaatattagcaatgacgggaggttcatcatcagcggtaaccatgatgtcttggacatcaacgaaagctgctgagggtatttcattagaataccaaaggaagagcttaataaattctagcagtattagtggcagcgcatcattggtttccgcaccataatgactagaaattttttatatactcccagtattactatacaaaagtgtcgtgttaatgtggtttctctgtcgccagagaaacaccggctacatgcttatttatttaccagggagaatatcagtaaattattatccctggctataaataagcatcggacagaggagagcatccatattaccaaactggtgcttaatttaggcgttattccggaaggacacttttcgacgctgtttaaccaacgatttgcgcaggcgttagagcaatgtatggaacagttagccactcaggctcatacacaaaacacacggcttgctcatgctacaccagccgagttgctggcgcacgttgaaagtaatcctgaggcgctcaccccattggctatttgctgcctgcaacagacctcgttgctgcaattgttacaaaacgggcaaccccagtatttgcggggtttattaaaacgactgctacaaagggaagataagcactcgtcagcgttagtggatacttgttatagccgggtgaccgccagccgtttagggatagcggcgctgtgctacctgcagcatcaggcgcaaggacatgactggctgagtcagcatacccccccagccagtcaagtgattagctgggcaaaggcgattgctcagggtgaaattccacctgaacagcttgcgcggttaatgaccggcaattggccttccgatagcgcattgcccgagcaacgagcctattcccccttggtcgtgatgcgttggttgttgccactatggcgacaacccgccgtgcgccaggtgattcatcgactgaaaggagggcggggggtgcaattggttgatgcttatctgagtcgttgtttacaactgcaggatgatgacgccatgcgggaggaagaagggatgcatccagacctccagcaggttgagctaccgctcgataacaccgtgttgctggagggcgaggaggagcataccgtgcgggatcatgccacgttgccgcagggcaaggagaggccgtccgatcccaaacgggttgcactactgcgggataacgccacattgccggggagtgaggagatgccgacaacatctcggtgcacgatgcaaccgagggaaggcggtctccgctcgccgaatgaacagctctcgccgagtcaggatatcagcaatgccggtttgctccttctgtggccgcttttgcctcagctgttttccctgctgggtctgcgggaggaagagcggtttgtcagcgatgcggcgcggtggcaggccgtgtacggtctcgatcgattggtctggggggaggttaacccgacggaggaccggttgatgttgaatctggtgttatgtggggtgtccggctcaacctccgtaacgccgccgacaccgctgagtctgctgcaactgcaacagattgacgcctggctggccgctatcggccaacaacttcccggttggcaaaaattgagcctgatggatattcggcagttgttcttgcagcgggcaggtgaaatcagcatggaaggagcattcccccaaattagtgtgcggccggaaccctatgatttcttactcagagattggccgtggccaatgacgctggcgtctttcccctggactgaacagccactgactatcgtctggccgctaaccgatttcacaggataaaacagccgctattttctcttcttatcggatatcaacatgacgctttcttcaacctttcagcccgcgtttattccgcagggtgattgccagctatcgctattattcagcgagctggaacgcatcgatctgctattacagcattattattaccgccattcagcacgtcacgaggattttaacgcgtttctgcttagcgaagaggaggttgaggcgcgaatgaaacaccctgtcggcaggcctcattgggccgctgccacgccgccgatttaccggacggaaaacgggcagccattgttaaccgaaggcttaacggacctgattaatcgtttcgaactcactgattttgaaagagacacggtgttattgggattgctgccccattttgacagtcgctattatgagctgttttcctggatccaggggggaaagcaaagtcaactgcccagtttttcattggccttaacgctattttgtccttcagatagggagagacgggcacagcaagccagttttttgcatcgggcaccgttaatgagctgtcagctattaacgattgaggagaataaaaaaaatccggcatggagccacacccgctttatgaccgacagcagtgtgtaccattttttactcgggcatcattatctggcgccggcgttagcgtcatgggctgaatggccaatccccccggcgttgcctttttatcctgccggcttaaaacacgcgctggcaggcgtgttactgactgacgatatcgagccgcgccccgtggtgttgctgcgcggcatgccgggtagcgccagagcccatgcggtgtcgagcatttttgcctctgaaaaccggcagacgctgcaggttgatatcgataagtgcaccgagagtgatgacgatgcgctgctactgcatttaacctgtctgatgcgcgaagcccgtatgcgcggcgcgggaatggtgatccgcaacctgcaggcacggatggaaaagagcacgtcactgccggagaggttatctgagcacctgaaccagccgggattaagggtggtgtgcctggtcgaaccctatgccccgcctttatggctgaaaaaaacgcccaccttgcagacagagatgccggtgttgacgcaggaggaaaaaacgcacctgctcatgggttgtctgcctgaacgacgcgcggcggatattgatcttatcagtttaagccagcgctacacctttaccccggaaagtctgccgctgattgtgcaagaggccgaactgtatcggcagcaacgtgacccggcggatgttctgcaacagtgtgatattcgtcaggcgctcaatttacgcacccaacagaactttggcgcgttagcgcaacgtattacgccgaagcggacgttaaacgacctgttggtgtcagagagtctcttgcagcaactccaggagatgttgacggccatccgctatcgggaaaaagtcctggccggcggttttaaagataaggtgggctacggcgtcgggatcagcgcgctgttctacggcgactcgggaaccgggaaaaccatggcggcggaagtgctcgcccataccctgggggtggatttaatcaaggtagatctctccacggtgatcaataaatacattggtgaaaccgagaaaaacctctcccgtatctttgatttggcagagcaggatgccggtatcttgttctttgatgaggccgatgccttatttggtaagcgcagtgaaaccaaagatgctcatgaccgtcatgccaatattgaagtgtcttacctgttacaacggctggagaattttcctgggttggttattttatccaccaataaccgcagtcacctcgacagtgcgtttaatcggcgatttacctttattacccgctttacttatccggatgaaacgttgcggcataaaatgtggcaaaaaatatggccgaagcacattaaggtttcaccggacgttgattttgaaaaattagcgcagcgagcaaatatcaccggcgcaaatatcaggaacattgccctgttagccaccttctttgctgaagaaagtggcaatcaagaagtcagtcacagccatatcgacgcggcgttaacccgtgagttggctaaaacagggcggcttgcgctgtaacctgctgcctaaacagccagaacacacaacaccatcatggacagtgatgacttactattaatgcagaggaatgagtatgtctaattatcaaacgctggtcgacgtgaataacgcgatgaataagatgttgcgcgcttatgtgaatgaggccgtggcaatccgctttgatttaccggatgtggatgccacgcaggcagatgccgcgataagcgtgtttctttatgatatccacgaagacctgcagctgcgtactgcagagtcccgcgggtttaatgccggcgcaggacggttattacccggttgggtcaacgtgaagtgcaactaccttattacgtattgggaatcaaccggccccgccacggatgccgacaacccggacagccagcccgacaaccaggctatccaggtgatgtcccaggtcctggcggcgttgattaacaaccgccagttagccgatatccccggggcttacacgcaggttatgccgcccaaagaaaacctgaatagcctgggtaacttctggcagtcgctgggcaatcgcccacgtctttcgctcaactattgtgtcactgtgccgattagcctgagtgataaaggcgaggaaatgaccccggtgaaatccttgtctaccaccgttgagccaaaagcgcccctttctccactggtcattacagatgcactgcgggagcaattgagggtggcgctagggggcgattatgatgcctgtcttgctatgacgcacgttaatctggactcctcaccggttgccaattcagacgggagtgcggctgaaatcagggtgtcgttgcgggtttacggtatgacgccgacagaatatcttgccccgatgaacactgtttttaatgaatgggaaaagagtgaagctgcggcggtcacgcccgatggctaccgtgtttatatcaacgcggttgataaaacagacctgactggtatttaaataaattctgatgtgaaaatttaaaagcataccgcacgctaattaatattaatcagtggtgagtttgcatttacaccccgtcatttatttaaaagaggtatatttatgccgactaaaacaccacagttacagctggcgatcgaagaatttaataaagcaatattacgggctgcagaatatgaatggaatattgaaaataatatttacgataaagttcacacacttttcccagcagcagataaatctctaaaagagagtgtggtcgcgcagagcgttgaaaaaatatctgaggaaaaccaggcgtttgagtttaaccacttgggtaacgatctccttgaatttccggcagtagaatatattgctcgttcttttttacgcagaatactggaaaaactggctatttatcaagctagagatccatcatttactataacgaaaaccaatcaggatgccgggataggtttcttggaagggtgggaaagcgataacgcgaaatgggcaaagcaaatgaacgcgctgctgaatgaaagcaaggttaacgcccgcgttttgaccagcctggcatacagctatatccgcttttttcgcccgctgaagacattgcgcaagctgggaggggaggctaatgagtctttgctgaacagcaaagaagccaacccgcgtctggatatttttgccagctcaacggcgggagcgccgccggtcatgtcgaagccgatcaccactcagcctcacggctgggtgtggctaaaatacgccgactggaacgccgcggaagcgttgggtatcaaaacgtccacggatttaattggcagccggccaagcagcgaccagcataaaggtacaggcttcaagtttaagggcatgctgcaggcgataaagccgccgctgtatcgacgccattcattttcccttagggaacgcgacgaacatgaatcggggtacggcggtttcgttatcaacgataagtcgatgacctcaataggggcagaaaaaccgttggtggtgaattggcgtcagcagaacatggataaaaagctgccgatgttttccggcccgtccagcaccacttcctatatgtatgaaattgcccgtttgctgaatctgcctgctgctgaaacacaggtatctacgttttcgataattcggctctgtcaagtatttaggtcagagtgtaactaatagttttgtcacattagcgtaggtcagataccagcgaatacactgaatatgcagccacaggaagagatgatggcagagtgcgatattgtcgcgtcgtatcgctgcattatccgcatggtaaaaagaagacacttaactttcattcggtcatagcgcttttcagagtccagtcgtcaataatccaatcgtgaggacagttttatgccttactccagtgagtcgaaggaaaaagaaacacactcaaaagaaaccgaaagagataatgctgacccagtatttcaacgggtcagccagggcggcgtgggtgtttcaccgcctgatgaggggggagacttgtcggccggaagtaacaatgaccatttattcgcttttattcgtgaaacacacttggaagaagcccaggaattcaggctaaaagggtataacagccaggtgcccgaggttgacgagggattactgacgcagctgcgtgacgacctggcggcggccaaatcccgccagtacgttcaggcaagcgttggggggccgctgggttctcggtggctgctggaacagataggcaaaatagagcggctgacggacaagttttctgacgaagtaataaaacgctgggttaagcatgagctgccacgaaaaaacgtaggggaagccgcggggaccgagttggggagccggcgtagggctcagtcgctggccagacggttggagtcaaccatgcagacactgatccgcgttgtccataccctgcatgctatggatgactacagtaccccggaaaaacggcacgacatgctggtcgctgagcttaccggcgcgttctcctccagtgataaaaatacggtgatacaggcgctggggagaatgacggcagagacgtcaggtcatgccgcctgggcttcccttatgcaggcccggacagcggcgtgggaggccggtaagtcagccaccgtcgatgcgatgattgcgacttcacagcacgaagcagaaaaagccaataaaaaagcccgtgagcttcagggcgattcacaggctttctttagtcatgtcgccgcctatcttcagagcctctccagcgatttggcaaaagtgtcgattaacatggggcagagcacctcttcctcgactatacggaacgaagcagaaaaagccagtgagcttcagggcgattcacagactttcgttagtcatgtcgccgcctatcttcagagcctccctagcgatttggcaaaagtgccgattaacatgtggcagaatatggattttgttaagacaaaattacaagcgcaaactgcagttgcgggaatgaaagtgcatgcgcaccggcttgtccggatcgcacagcatggtcactccaccaaaacccctgcgaaggatcccgaacaggtcgttaccgattccatcatcagaagcattttatggctgtggcagcagccggccatcaaaatccagtgcgccagcactgcgttgttgtcaaaagtgggtgagctgaaaaaaattgaggggatactggcttcttacgccgtgacggatgagctgggaaacgaacaagaacgccgcaaccctccgggtgaggaggacctggatgcacagctcagggaatgggtgagcgccagccttaagcaggaaaaccccgaaaaccagcgggcggtaaaagtggtgacgctggagcggctgctgggcggtgatatcgccagtgcccgcaacctggtggaacgtctgggaaaagcggaagagggtattcagaatctgctcaggcggcagcaggttgctgtcctgaaaatgtcagttgagcgcttgcctgccgctgtttcctctctgaaggccgtggataaattactgccggatttggcaggtgacctcacggcgagtatcgccgccctgagcaacgcccttcaggcagccgaataccccgcccgcgactttagcgaagcaaaaatacaggccggctatgcacaattgtgggcgacaaaggtgaaggaaagtctgtcggcagcgtctgcacggctgaccgaaagaccgctggatgaacattcacggggcgcacgccttgccaaacattgggcaaacctcgccaaagaacggagcgtgggtaattatccgccgccggatgcacagcaggtacttgcctccctgaaggaacaggggctattagcggggaccctttcaaccggagatccggccgggtatcttttcgccacccggcttgccggtgagcttgaaaatgccggtaatggtgaattgcgattaccgatgagtccggagcaatatgttgctttagagaagggacttgttgagtatattgtaaaatggggacaacggcggatctcacaaggagtcacccgcattgttattgagttgtcctttgagcaggctctggatacggtatcgttcaacgtgtccaagctcttccggttaccttataaggtgctgaaggcctcgataaaaataccgtacaatgtcaataaggttaataattataccatgccgggccatgataagccctataaggcaatttatggcttgctgggaaaaaagcttaagcaacttggctttaatttactgacggcacccgtgcctggcgtgatgaaacttgtggctggcaccgggataaccgcaggtgcaggcgtgcataatttacgtgtcgaaaatagagagaaaacattcagcgcggtttatcaacacgtggtggaaggaaagcaaagtgaaaaaataaaaatggactccgtgaagtcgatgatttttgattcagtgctcgataccgccactacggccgcttttaaagggggacgaagagcctggcaatcaggaagaaataaaaacgacattgaaatcaatgaggtaacactttctcaagcacagcagcgccaagtggcagccaacaatgttgacactgcatgggggaatgctgctgcgaatgagaggaaggttgagccagtgagtcattcatcaccattacagcaacaaaccgatgttaggccgttctctgataagagtgaccaggatgctgctcaacctcgagtacgtaaacgggcagtggcggatatggctccccctccccctcatcaatggcataataacattcctgccaacacgacgctacagtcagaacattttgattttgatcgtgacatacgttatcagggcttctccgatgagaagaaaaaacaaacctatttacatggtattcaacttgtattgcttcagatacaaaatgatggacgctttgcacagaagatcaggaataatgcctaccttgccagtataggcgtttcgaacttagtacctgtcgatatagaaggatataaacttaaaaatacatttcttcttcctgatagcccaagtgctaaatctggagttattgttcgcttagattctgaaaatccttattactatgttggcaaagggagtgatcttttagaagacatcaaatgggccatgcctcatgatgctaatgaacagaagtatgaatatatgcctgattctgatgggaacgctcacttttaccgtctgcgcaacggttttgatatctttaatgatattaggatggggaattcaagtttcgaatatttctttaattataataatccggagccgataagcatcacgagactttcttcatatcttgcaaatactattgagggtgactataaaaacggatcgtcgcccccaaaaaacaaactattaatttccagagcgattactggtgctcatattcctgacccaggggtcactgcaaccgccgctggatatcatatcgaattcacctgggataatttgacttcagcagagtatctgaggtcattttcaaggcccttctctaccctcagtggagaaatgcagttagtgtctagctccattaatggagaaacgatacaggaaacagagctgcatgttcatcaggctgaatatataggaagctgggttgatgctactgtcggggccatcacatctttcacgccggagggatgggttctcaataccacactatcggcagcggacattgctgctgatttgacagaagataaggatcctgacccaatggcggttgctggcctggttgtaggatgcattcctggtggtcggattgcagctaaagtcggaaagttcacccgtattggcggtaaggttgttaaatacgggcttatgcttggcaataaagcggtcgacctggccatcgtagggaagagcgttaagatagctgtagacacgggtgatccactcgcaatttataaggcgcttctgatcagtggcataggtactacgaattcttacgatatggcaaagaatatgtcatcaaagctaaaaatcagcaagaaactggaagacagtgttcaattagataaaccactacaaaatctaaggggaggaagcaagcgtcctgaagagggtgaatcaacctcgcagaagcgttcacagccagatgagagtccagaaaatagtcaggaggctgtatattcaggcccctccggcagagctcgggtgacttttgaccagacgaccgaacatcatataatgcttaatagattttccagacttgtgttagctagaagttttgcagagaaaagaatacagtcttttgaacacagttcttcgaaatttaaaagcagtgacgagtttaaggtagataaaagcatacctttagatgcacaaaatgcttcacttaacgacatggcgagtaagacagataacttaattaatcagctagaacaatttacaggagataagaaagaatccatttccgccaatctgaaaaacatccagttaatgattggtgatataatggaaaatagaaacaataggaatgataatttaaatttccatacttatgtcttggttgggaaaaatacaacatatgacgaaataagtaactattatggttttgctgagtttaaattttcaataaataatggcaatcttactcttaacaaccttataggccacccttatgtcgtcattaataaataccctgaatttagagattatttgataagaaatggagtcatcacccaacccgagcttgaaccatataacataaagaatgtggctcggtatcttggctctaaagcggtgagcagtgagattggttattatgaatccattccagctactaaagtgaagattctctcgtttactggagccaatccgattacgcaaaaattaggtaatacacttcagagtatctctgatcttttttcaaaaaaacgattttcggacgaaccgaatgacgccatcactcaggatgaactatttacccgtcagactgatttatatacttatgatgagatgataaatcatctaaaaactatagtaagaacgacattcacacctgttaaaccgatagaagaaatatccagtgaaaaaactgatgcggccattaaaggaataatgaccaatggggatgcggaaataatttccgaaaacattatcgagagcaaaaatagtttagaccatgatacaagttatttttctcatgaagttatttcagctgttgatcgtgcatatgaaaaagtaaactccgtgaaatctctttttgaacgtgcagaatctcagcctgagattaaatctcaattaaaatcattaattaatgaagccactggattgaatgatgaggttatcattgatattgataaagtagatgtttctagcatatcagacatggcctataacaggtttaaagataatatcaatactctacatgactatctctctaagcaaaaatcagggggttatacatcctttgttttatttaaatatcgccagtttaatccatccaagcctgatgcctttgccatgccctatgacagtaagaaaagaatttttctggctatgttgccagaaaatcagcgccatggtggattagttgatacggtgacccatgaagcttcacataattcttcttacacattagatcatacttatatagggaacgcgcggagtaacaccggttcatttccttcctcatttgaacctccaactcgagattcgaggtatttttatgaaaatgaacgggtaggtaaactgagtgcaaagtatgctttagacttacccgaaaatgctaatatcacccaaaatcaactagcgcaggcagatattctgttaagaaacagcaggttgactaaagcagatacgcttctgaatgctgcagaatataatgcttatatgattgacgttctaagccgggtaaaaataaacggctcacatattgagtttgaagaaaactcatccagaagcaaacgctctgtttccggaggaaatcataaacttgatgatataattatactggcttcgatgaacgctacgcttcctaggagggaggggggggaatttgagtcatctaccttcaagaaaacattaacggaatttataaacaagggtacgaccagcagtcaggttgatcctgtttatgcatcctatctaccagcgtttaataccattgtagatagcgagggtattacattgcaacaggtgaaagacttaaaatcagctctgcccgcaaccggcaacgatctgagggctcaagccagatataactatgcggtgctacaatatttatctgggtcggcaggaattaagctaccaattgatactgatgtaatacgaaatagcattaatgatgatctgaatattgcaagttgcgtagataactgtaaaaaggcagcctcacaaaggcttgagttgttgaaggcggtgccagaatatttatctgggccggaagcaattcacgcacagattgatactaatttaatgataaatagaattaagaacactctgaaacatgaaaattacacatatgatcttaaagtaaatgaaagggattatcttttattacagttggaacaaaaatatatagcttcgagtaaacctcctaaagtcggagctcaaaaatggagtgctgacataaataaagaaattaattatttatgcgatgagatcgaagaaaaaaaacgcgaggtggtttgttgggagaataagaagaatgaatcatcacgaagacttgatttgtggagtacggcgacgaaatatttatctgacccgaaaggaattaaaccaccgattgatactgatgtaatactcaataacattaatgatgttcttaatcatgctggctacgtatataactataaagtgagagaaaaggataatcttgagaaaaagttgagtagaacccccctaacaagtcagatagaagtgaaccgtttacaaaccgagatcgcaaaaagatatagactaatagattattgggggaaaaaagcagatgaaacattactaatgtttatcttgtggaggaatgtgtttggttaaggatcctctagagtcgacctgcaggcatgcaagcttggctgttttggcggatgagagaagattttcagcctgatacagattaaatcagaacgcagaagcggtctgataaaacagaatttgcctggcggcagtagcgcggtggtcccacctgaccccatgccgaactcagaagtgaaacgccgtagcgccgatggtagtgtggggtctccccatgcgagagtagggaactgccaggcatcaaataaaacgaaaggctcagtcgaaagactgggcctttcgttttatctgttgtttgtcggtgaacgctctcctgagtaggacaaatccgccgggagcggatttgaacgttgcgaagcaacggcccggagggtggcgggcaggacgcccgccataaactgccaggcatcaaattaagcagaaggccatcctgacggatggcctttttgcgtttctacaaactcttttgtttatttttctaaatacattcaaatatgtatccgctcatgagacaataaccctgataaatgcttcaataatattgaaaaaggaagagtatgagtattcaacatttccgtgtcgcccttattcccttttttgcggcattttgccttcctgtttttgctcacccagaaacgctggtgaaagtaaaagatgctgaagatcagttggggcaaactattaactggcgaactacttactctagcttcccggcaacaattaatagactggatggaggcggataaagttgcaggaccacttctgcgctcggcccttccggctggctggtttattgctgataaatctggagccggtgagcgtgggtctcgcggtatcattgcagcactggggccagatggtaagccctcccgtatcgtagttatctacacgacggggagtcaggcaactatggatgaacgaaatagacagatcgctgagataggtgcctcactgattaagcattggtaactgtcagaccaagtttactcatatatactttagattgatttacgcgccctgtagcggcgcattaagcgcggcgggtgtggtggttacgcgcagcgtgaccgctacacttgccagcgccctagcgcccgctcctttcgctttcttcccttcctttctcgccacgttcgccggctttccccgtcaagctctaaatcgggggctccctttagggttccgatttagtgctttacggcacctcgaccccaaaaaacttgatttgggtgatggttcacgtagtgggccatcgccctgatagacggtttttcgccctttgacgttggagtccacgttctttaatagtggactcttgttccaaacttgaacaacactcaaccctatctcgggctattcttttgatttataagggattttgccgatttcggcctattggttaaaaaatgagctgatttaacaaaaatttaacgcgaattttaacaaaatattaacgtttacaatttaaaaggatctaggtgaagatcctttttgataatctcatgaccaaaatcccttaacgtgagttttcgttccactgagcgtcagaccccgtagaaaagatcaaaggatcttcttgagatcctttttttctgcgcgtaatctgctgcttgcaaacaaaaaaaccaccgctaccagcggtggtttgtttgccggatcaagagctaccaactctttttccgaaggtaactggcttcagcagagcgcagataccaaatactgtccttctagtgtagccgtagttaggccaccacttcaagaactctgtagcaccgcctacatacctcgctctgctaatcctgttaccagtcaggcatttgagaagcacacggtcacactgcttccggtagtcaataaaccggtaaaccagcaatagacataagcggctatttaacgaccctgccctgaaccgacgaccgggtcgaatttgctttcgaatttctgccattcatccgcttattatcacttattcaggcgtagcaccaggcgtttaagggcaccaataactgccttaaaaaaattacgccccgccctgccactcatcgcagtactgttgtaattcattaagcattctgccgacatggaagccatcacagacggcatgatgaacctgaatcgccagcggcatcagcaccttgtcgccttgcgtataatatttgcccatggtgaaaacgggggcgaagaagttgtccatattggccacgtttaaatcaaaactggtgaaactcacccagggattggctgagacgaaaaacatattctcaataaaccctttagggaaataggccaggttttcaccgtaacacgccacatcttgcgaatatatgtgtagaaactgccggaaatcgtcgtggtattcactccagagcgatgaaaacgtttcagtttgctcatggaaaacggtgtaacaagggtgaacactatcccatatcaccagctcaccgtctttcattgccatacggaattccggatgagcattcatcaggcgggcaagaatgtgaataaaggccggataaaacttgtgcttatttttctttacggtctttaaaaaggccgtaatatccagctgaacggtctggttataggtacattgagcaactgactgaaatgcctcaaaatgttctttacgatgccattgggatatatcaacggtggtatatccagtgatttttttctccattttagcttccttagctcctgaaaatctcgataactcaaaaaatacgcccggtagtgatcttatttcattatggtgaaagttggaacctcttacgtgccgatcaacgtctcattttcgccaaaagttggcccagggcttcccggtatcaacagggacaccaggatttatttattctgcgaagtgatcttccgtcacaggtatttattcggcgcaaagtgcgtcgggtgatgctgccaacttactgatttagtgtatgatggtgtttttgaggtgctccagtggcttctgtttctatcagctgtccctcctgttcagctactgacggggtggtgcgtaacggcaaaagcaccgccggacatcagcgctagcggagtgtatactggcttactatgttggcactgatgagggtgtcagtgaagtgcttcatgtggcaggagaaaaaaggctgcaccggtgcgtcagcagaatatgtgatacaggatatattccgcttcctcgctcactgactcgctacgctcggtcgttcgactgcggcgagcggaaatggcttacgaacggggcggagatttcctggaagatgccaggaagatacttaacagggaagtgagagggccgcggcaaagccgtttttccataggctccgcccccctgacaagcatcacgaaatctgacgctcaaatcagtggtggcgaaacccgacaggactataaagataccaggcgtttccccctggcggctccctcgtgcgctctcctgttcctgcctttcggtttaccggtgtcattccgctgttatggccgcgtttgtctcattccacgcctgacactcagttccgggtaggcagttcgctccaagctggactgtatgcacgaaccccccgttcagtccgaccgctgcgccttatccggtaactatcgtcttgagtccaacccggaaagacatgcaaaagcaccactggcagcagccactggtaattgatttagaggagttagtcttgaagtcatgcgccggttaaggctaaactgaaaggacaagttttggtgactgcgctcctccaagccagttacctcggttcaaagagttggtagctcagagaaccttcgaaaaaccgccctgcaaggcggttttttcgttttcagagcaagagattacgcgcagaccaaaacgatctcaagaagatcatcttattaatcagataaaatatttgctcatgagcccgaagtggcgagcccgatcttccccatcggtgatgtcggcgatataggcgccagcaaccgcacctgtggcgccggtgatgccggccacgatgcgtccggcgtagaggatctgctcatgtttgacagcttatc

SEQ ID NO: 2 - protein, 149 aa, Serratia entomophila
MAITADDIAVQYPIPTYRFIVTLGDEQVPFTSASGLDINFDTIEYRDGTGNWFKMPGQRQAPNITLSKGVFPGKNAMYEWINAIQLNQVEKKDIMISLTNEAGTEVLVSWNVSNAFPTSLTSPSFDATSNEIAVQQITLMADRVTIQTA

SEQ ID NO: 3 - protein, 354 aa, Serratia entomophila
MTVTTTYPGVYLSEDAVSSFSVNSAATAVPLFAYDSENTNTINKPIQVFRNWAEFTVEYPTPLEDAFYTSLSLWFMHGGGKCYLVNEANIADAVAQYDDITLIVAAGTDTTTYTAFTTVVGQGYRIFGLFDGPKEKIAGTAKPDEVMEEYPTSPFGAVFYPWGTLASGAAVPPSAIAAASITQTDRTRGVWKAPANQAVNGVTPAFAVSDDFQGKYNQGKALNMIRTFSGQGTVVWGARTLEDSDNWRYIPVRRLFNAVERDIQKSLNKLVFEPNSQPTWQRVKAAVDSYLHSLWQQGALAGNTPADAWFVQVGKDLTMTQEEINQGKMIIKIGLAAVRPAEFIILQFSQDIAQ

SEQ ID NO: 4 - protein, 451 aa, Serratia entomophila
MATVTSVPGVYIEEDASPAMSVSASATAVPLFVARFTPLKPELAGVITRIGSWLDYTILFDSNVPSSARVTVSSTAVEPSPEFDALETASSKATTTYTYQIDDTEVVDPTASVALRLYFQNGGGPCYLYPLEKADDNGPLAALPDLIDEVGEITLLASPDPDETYRTAVYGALAASLDQHKGYFLLADSVNGDAPSAVGGSAQVAVYYPNVEVPHTRKLDDAEVAIDGYLDDEGKAVTTLAALRVVNTEFAGEIAQSLSGDLSAPLSLPPSALIAGVYGKTDGERGVWKAPANVVLNGVSDVSVRVTNEQQAELNPKGINVIRHFSDRGLVVWGSRTQKDDDDWRYIPVRRLFDAAERDIKKALQPMVFEPNSQLTWKRVQTAIDNYLYRLWQQGALAGNKAEEAYFVRVGKGITMTQDEINQGKMIIQVGMAAVRPAEFIILKFTQDMSQ

SEQ ID NO: 5 - protein, 417 aa, Serratia entomophila
MTMVLPGVSYNETLLTQASNDDPVTMPLFIGYTPPDTAIPVTVMQPVSVGSLTQANSLFGQRGTLAYSLRHFFENGGLQCYVLPLGPGKGEPAARLQELIAALQTPQMLETLLADDKTGLVLVPELSELNEVSSTSLSAEGVDAAEVDADALWYQGWQVLLTLCRQAPQRFALLELPEDPASAVTLTQQSFSADQCQRGAAWWPRLETSYQDESSAPVVLSPLPAVAAAIQRSAHDNGVWKAPANIALAKTRRPTQSILTSQALLDNQGVSCNLIRSFVGKGVRLWGCRTLLNEENTAWRYIQIRLLVSSVEHYLSKLARAYLFEPNTAPTWMKLKGQVWTWLRQQWLAGAFFGTVEDEAFSLSIGLDETMTEDDIRHGKMILQVRLALLAPAEFIAISLTLDLRDGTASAQTGGQS

SEQ ID NO: 6 - protein, 149 aa, Serratia entomophila
MSTPAVSHRFLVNFLFNNIPNPFDIAFQRISGLSRTLEVSQHREGGENVRNLWLAEQVNHGSLVLERGVMNASPLTLQFDRVLRRESTQWANVVIMLLNELSLPVTTWTLSHALPVRWQMGDLDAGSNQVLINTLELRYQDMRMLGVKL

SEQ ID NO: 7 - protein, 54 aa, Serratia entomophila
TVEIRELIVQVEVTEPAPSAPSLPFAQHREWDDQRWVERIKQEVLEQLLERGCL

SEQ ID NO: 8 - protein, 228 aa, Serratia entomophila
SLLERGLSKLTLNAWKDREGKIPAGSMSAMYNPETIQLDYQTRFDTEDTINTASQSNRYVISEPVGLNLTLLFDSQMPGNTTPIETQLAMLKSLCAVDAATGSPYFLRITWGKMRWENKGWFAGRARDLSVTYTLFDRDATPLRATVQLSLVADESFVIQQSLKTQSAPDRALVSVPDLASLPLLALSAGGVLASSVDYLSLAWDNDLDNLDDFQTGDFLRATKGEEV

SEQ ID NO: 9 - protein, 528 aa, Serratia entomophila
SHITLDIAGQRSTLGIRRLRVQQLINEIPLAQLELHIPTDNHGAADNAVQHEVSRFTLGVRVGIAQDNKPLFDGYLVQKKMQLKGKEWSVRLEARHALQKLTFLPHSRVFRQQDDSTVMKGLLQSAGVKLTQESAAQLSSKHDQLLQFRLSDWQFIRSRLLSTNCWLLPDAASDTVVIRPLSDAAMASRTLARDSHDYTLYEINLNFDNRFTPDSLSLQGWDIAAQRLTAAQKSPAGAFRPWKPAGKVGQSSAGRQDYALAFSMLPEATLQTLSNSWLNYQQMTGVQGHIVLAGTRDFAPGESITLSGFGAGLDGTAMLSGVNQQFDTQYGWRSELVIGLPASMLEPAPPVRSLHIGTVAGFTADPQHLDRIAIHLPALNLPDSLIFARLSKPWASHASGFCFYPEPGDEVVVGFIDSDPRYPMILGALHNPKNTAPFPPDEKNNRKGLIVSQADQTQALMIDTEEKTLRLMAGDNTLTLTGEGNLTMSTPNALQLQADTLGLQADSNLSIAGKQQVEITSAKINMKK

SEQ ID NO: 10 - protein, 140 aa, Serratia entomophila
MSNDILKATLGQCWAFPPRFSPDTGVSLTAGVEAVMQSLRVLFMTEPGERIMRESYGGGMHDFIFENITDELLANIHNRIEESILRHEPRALLKDVIIQPDKQEASRLRAQITVYLAGSDLVETVDGTLNIHDGQTLRLL

SEQ ID NO: 11 - protein, 139 aa, Serratia entomophila
SNLVVIDGDALTFNPQFGAITITPPPQPRISGSGEASIGGKKICIVGDEKQVSFTVDYIKPPFVASPGKGTLTIKALASEQRAEFATAPAPMIVVGSQFTTQFQPTTPAQDPQGKPDTDLSAVTGVGTFINSQSFVTAG

SEQ ID NO: 12 - protein, 607 aa, Serratia entomophila
MSDLEQLKQILGNGLTDQTFLLEPRTGKGLLNLMAKYTEAVPFAGHTDADWKDFWMAGCTLEALSDIYQYPGLAEKKLPVQQAFLLALLHLLETPRAMLNTVPARHRSLYYRDLLGFAPRAPQPDSVAVSFTLQRNSSPYALPAGSLLDGGQDSAGNSITYQTDDSLLITGQQLEQLCWTAQVGETWKRYTAIDSATGVTLPAEGLRLFTATGQGTDTKEKAPELYLGFSGTSAQDTLSLYWSVRASSALDVTWWYYQGTKWASLDAELQDNTASLSVSNLWRARLPADSQPGSGLPQDDEPLEAGYYWIKGTLKENKEAKDENSPAEAMPQLQAVLANAMTATLNVAQAIDDSHFSQPLPANTINQLVTPVAAISDVRQPLPSVGGQPRETEMAMLQRAAPRIAHRQRAITWNNMRSLLMEHYPEIFDVRFPDVDKLSRLPALEVQSLMVIPDGRYGDNDDALRPALSNGRLSRMAQWLSQYTSLWAAPTLKNPKYIDVTARYRVTFVVGIRPDYGYRQLAAQLQHDYMPWATDRRQAVTPGNQVDYYQLLATLQQSPLVQSVNALVLSHDVIDETGKPTSMETQSTVTARDDEVLILCPEGETHV

SEQ ID NO: 13 - protein, 961 aa, Serratia entomophila
KENALFPAVKDAIVFDALWQQAHEKVTALSGEIWTDTGDHDPGVTLLQSATWNCSDLSYRASLSLNDLLTHQDQSTLFPEEFGPEQVLTCNTVTAEDYRRALLDVHSSDIQALDTPEQDFLFSDVSLTQEPKEHRFHWWYNAEKREYSFRKPTDSGEVNELKLRGNLWLSLVPTRYTQSLSPENLAAVEQCLAEFLAAHRNLGEVVSRITWLQPATFSPRMTIELADNIGDINQVAAQIYQVTDAFLRPAVARYTTEQRRALGDADDAIFEGPRLKHGWQQTAPSQITSGGYVLNLGPLVNLLLAIPGVASLSTLSVDKGDGHITAVTGDNLRWQVADGYYPLLWGAPPLSLLAGDDSPLTLVSKGGIRNTLESEAMAGYLTQADLIVTTPTVLPAGRFRDQTLYIPIGQRQPECYALQQPDTVIDDQTRAVHQFLLPVDQLLADGTAELAQLPTLLAFKNRGDAIRGTRWPYTNAMVQQAIHQPYAKTLEAIAQQDAAIFTQDKQPVGGNYARELDFLQYLLGYFGTQRAALPLTLDLPDFLATQRAYLAQQPALGYDRINIRIDQVSALQKRIAARIGLDSICFADNPDLGQLPFYLIEHRQLLPQTPDSTFDSEQTPSGFAVAEPDITLTQAGSVGKVVQGQLIDLIAIEGGSRLHVSRLLVIKAEGDSFTVSTENSQQLHNTLSRLETAWASHNLRWQNSNVWLQDMDYRLNYAEAKLQPANPQQRLLASNAQSPYPAMVSVGDGIVLRPAGLQFYMPGANATRAATLDADWQLAATVKAVDPIAGTLLIEKAAGSTEDFPSAESSFRYQWAFSQANYATTDRFSFVVSAVLNRRLIENPNIVPEQLVAWIQETIMAEFPAHVSLINHWLDDATFNNFGVTYSRWQNSGMPLGDDAFALMQILTLGHLPVTQLDIGLMRIATEEQRTEVIGDGSQWHEDVILREELFYVPKDVQTTL

SEQ ID NO: 14 - protein, 636 aa, Serratia entomophila
MTDKTPKKTAETPVNTQATLADTTDTARDSEPKSRALPQADALKARFKAGSIPLQTDFADLIDLANMGRQAVGGAEGQTGPANGFTLSSEGLLELKPNATKGIVVDKDGIAVKAEASKGLQVTSNGVGVQAGNGVAVNGSGVNVKLANGTASVTTGNAGGLTLAAAGLSVQAGSGISVANTGVAVQAGNGISVTSTGVAVKAEASKGLQVTSNGVGVQAGNGVAVNGSGVNVKLANGTASVTTGNAGGLNLAAAGLSVQAGSGISVTSTGVAVKAEASKGLQVTSNGVGVQAGNGVAVNGSGVNVKLANGTASVTTGNAGGLNLAAAGLSVQAGSGISVTSTGVAVKAEASKGLQVTSNGVGVQAGNGVAVNGSGVNVKLANGTASVTTGNAGGLNLAAAGLSVQAGSGISVTSTGVAVKAEASKGLQVTSNGVGVQAGNGVAVNGSGVNVKLANGTASVTTGNAGGLTLAAAGLSVQAGSGISVANTGVAVQAGNGISVTSTGVAVKAGNGIQVNTNGVGLKSTAWINVMCGLHNATFYVYSSYFCAFFCNYSNGCVAYVYGRGAFYLSTVSGDIKLNSVSPNQILAMTGGSSSAVTMMSWTSTKAAEGISLEYQRKSLINSSSISGSASLVSAP

SEQ ID NO: 15 - protein, 535 aa, Serratia entomophila
VVSLSPEKHRLHAYLFTRENISKLLSLAINKHRTEESIHITKLVLNLGVIPEGHFSTLFNQRFAQALEQCMEQLATQAHTQNTRLAHATPAELLAHVESNPEALTPLAICCLQQTSLLQLLQNGQPQYLRGLLKRLLQREDKHSSALVDTCYSRVTASRLGIAALCYLQHQAQGHDWLSQHTPPASQVISWAKAIAQGEIPPEQLARLMTGNWPSDSALPEQRAYSPLVVMRWLLPLWRQPAVRQVIHRLKGGRGVQLVDAYLSRCLQLQDDDAMREEEGMHPDLQQVELPLDNTVLLEGEEEHTVRDHATLPQGKERPSDPKRVALLRDNATLPGSEEMPTTSRCTMQPREGGLRSPNEQLSPSQDISNAGLLLLWPLLPQLFSLLGLREEERFVSDAARWQAVYGLDRLVWGEVNPTEDRLMLNLVLCGVSGSTSVTPPTPLSLLQLQQIDAWLAAIGQQLPGWQKLSLMDIRQLFLQRAGEISMEGAFPQISVRPEPYDFLLRDWPWPMTLASFPWTEQPLTIVWPLTDFTG

SEQ ID NO: 16 - protein, 696 aa, Serratia entomophila
MTLSSTFQPAFIPQGDCQLSLLFSELERIDLLLQHYYYRHSARHEDFNAFLLSEEEVEARMKHPVGRPHWAAATPPIYRTENGQPLLTEGLTDLINRFELTDFERDTVLLGLLPHFDSRYYELFSWIQGGKQSQLPSFSLALTLFCPSDRERRAQQASFLHRAPLMSCQLLTIEENKKNPAWSHTRFMTDSSVYHFLLGHHYLAPALASWAEWPIPPALPFYPAGLKHALAGVLLTDDIEPRPVVLLRGMPGSARAHAVSSIFASENRQTLQVDIDKCTESDDDALLLHLTCLMREARMRGAGMVIRNLQARMEKSTSLPERLSEHLNQPGLRVVCLVEPYAPPLWLKKTPTLQTEMPVLTQEEKTHLLMGCLPERRAADIDLISLSQRYTFTPESLPLIVQEAELYRQQRDPADVLQQCDIRQALNLRTQQNFGALAQRITPKRTLNDLLVSESLLQQLQEMLTAIRYREKVLAGGFKDKVGYGVGISALFYGDSGTGKTMAAEVLAHTLGVDLIKVDLSTVINKYIGETEKNLSRIFDLAEQDAGILFFDEADALFGKRSETKDAHDRHANIEVSYLLQRLENFPGLVILSTNNRSHLDSAFNRRFTFITRFTYPDETLRHKMWQKIWPKHIKVSPDVDFEKLAQRANITGANIRNIALLATFFAEESGNQEVSHSHIDAALTRELAKTGRLAL

SEQ ID NO: 17 - protein, 283 aa, Serratia entomophila
NNAMNKMLRAYVNEAVAIRFDLPDVDATQADAAISVFLYDIHEDLQLRTAESRGFNAGAGRLLPGWVNVKCNYLITYWESTGPATDADNPDSQPDNQAIQVMSQVLAALINNRQLADIPGAYTQVMPPKENLNSLGNFWQSLGNRPRLSLNYCVTVPISLSDKGEEMTPVKSLSTTVEPKAPLSPLVITDALREQLRVALGGDYDACLAMTHVNLDSSPVANSDGSAAEIRVSLRVYGMTPTEYLAPMNTVFNEWEKSEAAAVTPDGYRVYINAVDKTDLTGI

SEQ ID NO: 18 - protein, 358 aa, Serratia entomophila
MPTKTPQLQLAIEEFNKAILRAAEYEWNIENNIYDKVHTLFPAADKSLKESVVAQSVEKISEENQAFEFNHLGNDLLEFPAVEYIARSFLRRILEKLAIYQARDPSFTITKTNQDAGIGFLEGWESDNAKWAKQMNALLNESKVNARVLTSLAYSYIRFFRPLKTLRKLGGEANESLLNSKEANPRLDIFASSTAGAPPVMSKPITTQPHGWVWLKYADWNAAEALGIKTSTDLIGSRPSSDQHKGTGFKFKGMLQAIKPPLYRRHSFSLRERDEHESGYGGFVINDKSMTSIGAEKPLVVNWRQQNMDKKLPMFSGPSSTTSYMYEIARLLNLPAAETQVSTFSIIRLCQVFRSECN

SEQ ID NO: 19 - protein, 2366 aa, Serratia entomophila
MPYSSESKEKETHSKETERDNADPVFQRVSQGGVGVSPPDEGGDLSAGSNNDHLFAFIRETHLEEAQEFRLKGYNSQVPEVDEGLLTQLRDDLAAAKSRQYVQASVGGPLGSRWLLEQIGKIERLTDKFSDEVIKRWVKHELPRKNVGEAAGTELGSRRRAQSLARRLESTMQTLIRVVHTLHAMDDYSTPEKRHDMLVAELTGAFSSSDKNTVIQALGRMTAETSGHAAWASLMQARTAAWEAGKSATVDAMIATSQHEAEKANKKARELQGDSQAFFSHVAAYLQSLSSDLAKVSINMGQSTSSSTIRNEAEKASELQGDSQTFVSHVAAYLQSLPSDLAKVPINMWQNMDFVKTKLQAQTAVAGMKVHAHRLVRIAQHGHSTKTPAKDPEQVVTDSIIRSILWLWQQPAIKIQCASTALLSKVGELKKIEGILASYAVTDELGNEQERRNPPGEEDLDAQLREWVSASLKQENPENQRAVKVVTLERLLGGDIASARNLVERLGKAEEGIQNLLRRQQVAVLKMSVERLPAAVSSLKAVDKLLPDLAGDLTASIAALSNALQAAEYPARDFSEAKIQAGYAQLWATKVKESLSAASARLTERPLDEHSRGARLAKHWANLAKERSVGNYPPPDAQQVLASLKEQGLLAGTLSTGDPAGYLFATRLAGELENAGNGELRLPMSPEQYVALEKGLVEYIVKWGQRRISQGVTRIVIELSFEQALDTVSFNVSKLFRLPYKVLKASIKIPYNVNKVNNYTMPGHDKPYKAIYGLLGKKLKQLGFNLLTAPVPGVMKLVAGTGITAGAGVHNLRVENREKTFSAVYQHVVEGKQSEKIKMDSVKSMIFDSVLDTATTAAFKGGRRAWQSGRNKNDIEINEVTLSQAQQRQVAANNVDTAWGNAAANERKVEPVSHSSPLQQQTDVRPFSDKSDQDAAQPRVRKRAVADMAPPPPHQWHNNIPANTTLQSEHFDFDRDIRYQGFSDEKKKQTYLHGIQLVLLQIQNDGRFAQKIRNNAYLASIGVSNLVPVDIEGYKLKNTFLLPDSPSAKSGVIVRLDSENPYYYVGKGSDLLEDIKWAMPHDANEQKYEYMPDSDGNAHFYRLRNGFDIFNDIRMGNSSFEYFFNYNNPEPISITRLSSYLANTIEGDYKNGSSPPKNKLLISRAITGAHIPDPGVTATAAGYHIEFTWDNLTSAEYLRSFSRPFSTLSGEMQLVSSSINGETIQETELHVHQAEYIGSWVDATVGAITSFTPEGWVLNTTLSAADIAADLTEDKDPDPMAVAGLVVGCIPGGRIAAKVGKFTRIGGKVVKYGLMLGNKAVDLAIVGKSVKIAVDTGDPLAIYKALLISGIGTTNSYDMAKNMSSKLKISKKLEDSVQLDKPLQNLRGGSKRPEEGESTSQKRSQPDESPENSQEAVYSGPSGRARVTFDQTTEHHIMLNRFSRLVLARSFAEKRIQSFEHSSSKFKSSDEFKVDKSIPLDAQNASLNDMASKTDNLINQLEQFTGDKKESISANLKNIQLMIGDIMENRNNRNDNLNFHTYVLVGKNTTYDEISNYYGFAEFKFSINNGNLTLNNLIGHPYVVINKYPEFRDYLIRNGVITQPELEPYNIKNVARYLGSKAVSSEIGYYESIPATKVKILSFTGANPITQKLGNTLQSISDLFSKKRFSDEPNDAITQDELFTRQTDLYTYDEMINHLKTIVRTTFTPVKPIEEISSEKTDAAIKGIMTNGDAEIISENIIESKNSLDHDTSYFSHEVISAVDRAYEKVNSVKSLFERAESQPEIKSQLKSLINEATGLNDEVIIDIDKVDVSSISDMAYNRFKDNINTLHDYLSKQKSGGYTSFVLFKYRQFNPSKPDAFAMPYDSKKRIFLAMLPENQRHGGLVDTVTHEASHNSSYTLDHTYIGNARSNTGSFPSSFEPPTRDSRYFYENERVGKLSAKYALDLPENANITQNQLAQADILLRNSRLTKADTLLNAAEYNAYMIDVLSRVKINGSHIEFEENSSRSKRSVSGGNHKLDDIIILASMNATLPRREGGEFESSTFKKTLTEFINKGTTSSQVDPVYASYLPAFNTIVDSEGITLQQVKDLKSALPATGNDLRAQARYNYAVLQYLSGSAGIKLPIDTDVIRNSINDDLNIASCVDNCKKAASQRLELLKAVPEYLSGPEAIHAQIDTNLMINRIKNTLKHENYTYDLKVNERDYLLLQLEQKYIASSKPPKVGAQKWSADINKEINYLCDEIEEKKREVVCWENKKNESSRRLDLWSTATKYLSDPKGIKPPIDTDVILNNINDVLNHAGYVYNYKVREKDNLEKKLSRTPLTSQIEVNRLQTEIAKRYRLIDYWGKKADETLLMFILWRNVFG

SEQ ID NO: 20 - DNA, 30459 bp, Serratia entomophila
  primer_bind 1283..1305: note = primer pBAD33_lin_NheI_RV
  primer_bind 1286..1340: note = primer afp1_pBAD33_with_RBS_FW
  primer_bind 10959..10980: note = primer SEAfp11_merge_RV
  primer_bind 10961..10982: note = primer SEAfp11_merge_FW
  primer_bind 26400..26444: note = primer SEAfp18C4trunc_pBAD33OH_RV
  primer_bind 26419..26455: note = primer pBAD33OH_SEAfp18C4_FW
  primer_bind 26434..26455: note = primer pBAD33_lin_BamHI_FW
  source 1..30459: mol_type = other DNA
  CDS 1320..1769: note = Afp1
  CDS 1788..2852: note = Afp2
  CDS 2872..4227: note = Afp3
  CDS 4267..5517: note = Afp4 without STOP codon
  CDS 5520..5966: note = Afp5 without STOP codon
  CDS 5969..6130: note = Afp6 without START and STOP codon
  CDS 6133..6816: note = Afp7 without START and STOP codon
  CDS 6819..8405: note = Afp8 without START codon
  CDS 8426..8845: note = Afp9 without STOP codon
  CDS 8848..9267: note = Afp10 without START codon
  CDS 9344..11164: note = Afp11 without STOP codon
  CDS 11166..14051: note = Afp12 without START codons MS
  CDS 14077..15987: note = Afp13
  CDS 16044..17651: note = Afp14
  CDS 17688..19778: note = Afp15
  CDS 19855..20736: note = Afp16
  CDS 20842..21918: note = Afp17
  CDS 22120..26433: note = Afp18C4 C-terminal truncation I1437
atcgatgcataatgtgcctgtcaaatggacgaagcagggattctgcaaaccctatgctactccgtcaagccgtcaattgtctgattcgttaccaattatgacaacttgacggctacatcattcactttttcttcacaaccggcacggaactcgctcgggctggccccggtgcattttttaaatacccgcgagaaatagagttgatcgtcaaaaccaacattgcgaccgacggtggcgataggcatccgggtggtgctcaaaagcagcttcgcctggctgatacgttggtcctcgcgccagcttaagacgctaatccctaactgctggcggaaaagatgtgacagacgcgacggcgacaagcaaacatgctgtgcgacgctggcgatatcaaaattgctgtctgccaggtgatcgctgatgtactgacaagcctcgcgtacccgattatccatcggtggatggagcgactcgttaatcgcttccatgcgccgcagtaacaattgctcaagcagatttatcgccagcagctccgaatagcgcccttccccttgcccggcgttaatgatttgcccaaacaggtcgctgaaatgcggctggtgcgcttcatccgggcgaaagaaccccgtattggcaaatattgacggccagttaagccattcatgccagtaggcgcgcggacgaaagtaaacccactggtgataccattcgcgagcctccggatgacgaccgtagtgatgaatctctcctggcgggaacagcaaaatatcacccggtcggcaaacaaattctcgtccctgatttttcaccaccccctgaccgcgaatggtgagattgagaatataacctttcattcccagcggtcggtcgataaaaaaatcgagataaccgttggcctcaatcggcgttaaacccgccaccagatgggcattaaacgagtatcccggcagcaggggatcattttgcgcttcagccatacttttcatactcccgccattcagagaagaaaccaattgtccatattgcatcagacattgccgtcactgcgtcttttactggctcttctcgctaaccaaaccggtaaccccgcttattaaaagcattctgtaacaaagcgggaccaaagccatgacaaaaacgcgtaacaaaagtgtctataatcacggcagaaaagtccacattgattatttgcacggcgtcacactttgctatgccatagcatttttatccataagattagcggatcctacctgacgctttttatcgcaactctctactgtttctccatacccgtttttttgggctagcaggaggaattcaccatggctattaccgcagacgacattgcagtgcaatatccaatccctacttatcgctttattgtgaccctgggcgatgagcaggtgccgtttaccagtgcttctggtctggatattaattttgacaccattgaataccgggacgggaccggcaattggttcaaaatgcccggccagcgacaggcccctaacattacgctgagtaaaggagtatttccgggcaaaaatgcgatgtatgaatggattaacgccattcaacttaatcaggttgaaaagaaagacatcatgatcagcctgaccaatgaagccggcacggaagtgctggtcagctggaatgtgagcaacgccttcccgacctcactgacctccccgtcatttgatgcgaccagcaacgaaatcgcggtacagcaaatcacgctcatggccgatcgcgtgaccattcagactgcctaatcaagaggacatgttgccatgactgtgacaaccacttatcccggcgtttatctcagtgaagatgccgtatcgagcttctcggtcaacagtgccgccaccgccgtgcccctgtttgcgtacgacagtgaaaataccaacaccattaataaaccgattcaggttttccgcaactgggcggaatttaccgtcgagtacccaacgccgctggaagacgctttttataccagcctgagcctgtggtttatgcacggtggcggtaaatgttatctggttaacgaggccaatatcgccgacgcggtggcgcaatacgatgatattacgctgattgtcgcggcagggacagataccactacctataccgcgttcaccacagtagtgggccagggctaccgtatttttggcctgtttgacggtccgaaagagaaaattgccggcacggcgaagccggatgaggtcatggaagaatatccgacctccccgtttggcgcggtattttacccgtggggcaccctggcatcgggggcggcggtgccgccgagcgccatcgccgcggcctccattacccaaaccgaccgtacgcgcggtgtgtggaaagcgccggccaaccaggccgtgaatggcgttacccctgcgtttgctgtcagcgatgatttccagggtaagtataaccagggcaaggcgctgaacatgatccgcacattctcgggccagggaacggtggtgtggggtgcccgcacgctggaggacagtgataactggcgctatatcccggttcgccgcttgttcaacgcggttgagcgggatattcaaaaatccctgaataaactggtgtttgaacccaacagccagccgacctggcagcgtgtcaaggccgccgtagacagttatctacacagtctgtggcagcagggcgcgttggccggtaatacccccgctgatgcctggtttgttcaggtcggcaaagatctcaccatgacccaggaagagatcaatcaggggaagatgatcataaaaatcggcctggccgcagttcgcccggcagaattcatcatcctgcagttcagccaggatatcgcgcaataattcactgaaggaaaagaacatggctactgtcacatctgtaccgggtgtctatattgaagaagatgcctcgccagcgatgtcggtgagcgcgagtgcgaccgccgtgccgttatttgtcgctcgttttacccctctcaagccagaactggcgggcgtgatcacccgcatcggcagctggctggactataccatcctgtttgacagcaacgtgccttcttccgcacgcgttaccgtgtcgtcaacggcggttgaaccgtcccctgaattcgatgcgctggaaacagcgtcgtctaaagcgacaacgacatatacctaccagattgatgatactgaggtcgtggatccgacggcctccgtcgccctgcggctctatttccagaacggcggcggcccctgctacctctatccgctggaaaaggcagacgataacggcccattggccgcgttgccggacctcatcgacgaggtcggggagatcacactgctggcaagtccggatcccgatgagacttaccgtactgcggtgtatggcgcgctggctgcctcactagatcagcacaaagggtacttcctgctggccgacagcgtcaatggcgacgcgcccagtgcggtcggtggttccgcccaggtggcggtgtattacccgaatgtagaagtgccgcacacccgtaaactggatgacgcagaggttgccatcgacggttacctcgacgatgaaggaaaggctgtcaccacactggctgcgctccgagtcgttaacactgaatttgccggtgaaattgcgcaatccctgtccggtgacctgagtgcaccgctgtcgcttccgccttcagcattgattgcgggggtgtacggcaagacagacggtgaacgtggggtgtggaaagcgccggcgaatgtggtgctcaacggcgtcagcgatgtcagcgtccgggtcaccaatgagcaacaggcggagctgaacccgaaaggcatcaatgtcattcgtcatttcagcgatcgcgggctcgtcgtgtggggtagccgcacacagaaagatgatgatgactggcggtatatcccggtgcgccgcctgttcgatgcggcagagcgcgacatcaaaaaggccctgcagccgatggtgtttgaacccaacagccagctgacctggaaacgggtgcagacggcgattgataactacctttaccgcctgtggcaacaaggtgccctggccggcaataaggcggaagaggcgtattttgtgcgcgtcggtaaaggtatcaccatgacacaagacgagattaaccaggggaaaatgatcattcaggttgggatggccgccgtgcgcccggccgaattcatcatccttaagtttactcaggacatgtctcagtaaagggggcccccctttccgactctttataaggatactgtgatgactatggttcttcctggggtttcgtacaatgaaacactgttaacgcaggcgtcaaacgacgatccggtgacgatgcccctgtttattggttatacccctcctgatacggcgataccggtaacggtgatgcagcccgtcagcgtgggatcactgacgcaggcgaacagtctctttggacagcgtgggacgctggcgtattccctgcgccatttctttgaaaacggtgggctgcagtgctatgtgctgcccctcgggccagggaagggagaacccgccgcgcgtctgcaagagttgattgccgcattacagacaccgcagatgctggagacgctgttagcggatgataagaccggcctggtcctggtaccggagctgagtgagctcaatgaggtgagttcgacctcgctttccgccgagggggttgacgcggccgaggttgacgccgatgccctttggtatcagggctggcaagtattactgacgctgtgtcgtcaggccccgcagcgttttgcgctgctggaattaccggaggatccggcgtccgcagtgacgctgacccaacagtctttttcagcagaccagtgtcagcgcggggcggcctggtggccacgcctggaaaccagttaccaggacgagtcgtcggcgcccgtggtgttgtcacccctgccggccgtcgcggcggccattcagcgcagtgcccacgataacggggtctggaaggcgccggccaacatcgcgttggccaaaacccgccgcccaacccaaagtatcctgacgtctcaggcattactggataaccagggggtgtcctgcaacctgatccgcagttttgtcgggaaaggcgtgcgtctgtggggatgccggaccttgcttaatgaggagaacacggcctggcgttatatccagatccgtttactggtcagcagcgtggagcactacctgagcaaattggcgcgcgcttacctgtttgagccgaatacggccccgacctggatgaaattaaagggccaggtctggacgtggttgcgtcagcaatggctggcaggggcctttttcggcacggtggaggatgaggccttttcgctcagtatcgggctggatgaaaccatgacggaagacgatattcgccatggaaagatgatcctgcaggtacgtctggcgctgctggcccccgcggaatttattgctatcagcctgacgctggatctgcgcgacggcacggccagcgcgcaaaccggaggtcaatcatgatgagtacacccgcggtatcccatcgttttctcgtcaattttttatttaacaacatacccaatccgtttgatatcgcgttccagcgcatatccggcctgtcgcggacactggaagtgagccagcaccgggaggggggcgagaatgtccgcaacctctggctggccgagcaggtgaatcacggcagcctggtgctggagcggggggtgatgaacgcctcccccctgacgctgcagtttgaccgcgtcttgcgccgggaaagcacgcagtgggccaacgtggtgatcatgttgctgaacgagctttcattaccggtgaccacctggacgctgagccatgccctgccggtgcgctggcagatgggcgatttggatgccggcagtaaccaggtgctcatcaacacgcttgagcttcgctatcaggatatgcgcatgctgggggtaaaactatgaccgtcgaaattcgtgagttgatcgtccaggttgaggtcaccgagcctgccccttctgccccgtccttaccgtttgcgcagcaccgtgagtgggacgatcagcggtgggtggagaggattaaacaagaggtgctggaacagctgcttgaaagggggtgtctgtgagcttacttgaacggggtttatcgaagctgaccctcaacgcctggaaagatcgcgaagggaaaatccctgcgggcagcatgagcgcgatgtataacccagagactattcagctggattatcagacgcggtttgataccgaagacaccatcaacacggcgtcgcaaagcaaccgctatgtgatttccgagccagtcggcctcaacctcaccttgttgttcgacagccagatgcccgggaataccaccccgatagagacgcagttggcgatgctgaaatccctctgcgccgtggatgcggccaccggatcgccttattttctgcgcatcacctgggggaaaatgcgctgggagaataaaggatggtttgccggccgggcccgtgatttatcggtcacctacacgctgtttgaccgtgacgccacgccgctgcgggccaccgtgcagttaagtctggtggcggatgagagctttgtgattcagcaatcccttaagacacaaagcgcccccgaccgtgcactggtcagcgtaccggatctggcctcgttgccgctgctggcgctcagcgccggcggggtgctggccagcagcgtagattacctgtcgctggcctgggataacgatttggataatctggatgattttcaaaccggggattttctgcgggcgacgaaaggggaggaggtatgagccacatcaccctggacatagcgggacagcgcagcacattggggatccgtcgtttgcgggtacagcagcttattaatgagatcccgctggcgcagctggagctgcatattcccacggataatcatggcgcagcggataacgcggtacaacacgaagtcagtcgtttcaccctgggcgtccgcgtggggattgcacaggataacaagccgcttttcgacggttatctggtgcaaaagaagatgcaactgaaggggaaagaatggtccgtgcggctggaggcccgccacgcgttgcagaaactgacgttcttgccccatagccgggtatttcgtcagcaggatgacagcaccgtcatgaaggggttgctgcagtctgcgggggtgaaactgacgcaagaatcggcggcgcaactgagcagcaagcacgatcaactgctccagtttcgtctcagtgactggcagtttattcgcagccggctcctgtccaccaattgctggctgctgcctgatgccgccagcgacacggtagtgatccgcccgctgtccgacgcggcaatggcctcacggacgcttgctcgcgacagtcacgactatacgctgtatgaaatcaatttgaattttgataaccgctttaccccagacagcctgtcactgcagggatgggatattgccgcacagcggctcacggcggcgcaaaaaagcccggccggcgcgtttcgtccctggaaacctgcaggtaaggttggccagtcctccgccgggcggcaagactacgccctggcgttcagcatgctgcctgaagctacgctgcaaaccctgtcgaactcctggctgaactatcaacaaatgaccggcgtacagggccacattgtgctggcggggacccgggacttcgcgccgggcgagagtatcaccctgagtgggtttggggcggggctggacggcacggcgatgctgagcggggtcaatcagcagtttgatacgcagtatggctggcgcagtgagctggtgattgggctgccggcgtcaatgctggagcccgcgccaccggtgaggtcgctgcatattggcacggtagcgggttttaccgccgatccccagcatctggatcggattgccattcatctgccagccctgaatctgcccgattcgctgatttttgcccgcctgagtaagccgtgggccagtcacgcgagtggcttctgtttttaccctgaacccggtgatgaagtggttgtggggtttatcgacagcgatccgcgttacccgatgatcctgggggcgttgcacaacccgaaaaataccgcgccgttcccaccggatgaaaagaacaatcgtaaggggttgatcgtgagtcaagccgaccagacgcaagccttgatgatcgataccgaagagaaaacgctgaggctgatggcgggggacaataccctcactttaaccggcgaggggaaccttactatgagtacaccgaacgccctgcaattgcaggccgatacgttgggtctgcaggctgacagtaacctgtcgattgcgggtaagcagcaggtggagatcaccagcgcgaaaattaacatgaaaaaataacctattacggtgaggttgctatgagtaacgacattttgaaagcgaccctggggcaatgctgggcatttccaccgcggttttcccccgacacgggcgtgtccctgacggcgggcgttgaggcagtgatgcagagtctgcgcgtgctgtttatgactgaaccgggcgaacgcattatgcgtgagagctatggcgggggtatgcatgactttatctttgagaatatcaccgatgaactgctggccaacatccacaaccgcatcgaagaaagcattctgcgccatgagcctcgggcgctgctcaaggacgtcattatccagccggacaaacaggaagcgagtcgtcttcgggcgcagatcaccgtgtatctggcaggctcggatctggtcgagacggtggacggtacgctgaacattcatgacggccagacgctgaggttactatgagcaacctggtggtcatcgacggtgacgcgctgacattcaacccgcagtttggcgctattacgatcacgccaccgccccagccacgaattagcggcagcggtgaggccagcatcggggggaaaaagatctgcattgttggggatgaaaagcaggtctcctttaccgttgactatatcaagcctccctttgtcgcttccccgggaaaagggacgctcaccatcaaagcgttggcgtccgagcagcgggctgagtttgcgacggcaccggcgccgatgattgtggtcggcagccagtttacgacgcaatttcagcccacaacaccggcccaggatccacaaggaaaaccggatacggatctgagtgctgtcaccggggttgggacatttatcaacagccagtcgtttgtcaccgccgggtgagtcatcgtgctgccgatagggcggaaacgggctcctgcgtgtcttctttatcatcacataaccaatggacaacattatgtctgacctggagcaactgaaacagatattgggcaacggattaacagaccagaccttcctgctggagccacggacagggaaggggctgctcaatctgatggcaaaatataccgaagccgtgccgtttgccggccataccgacgctgactggaaagacttctggatggccggctgcacgctggaagcgctgagtgacatctatcagtaccccgggctggcagagaaaaagctgccggtgcagcaggcgttcctgctggcgttgctgcatctgctcgaaacgcccagagccatgctgaacacggtgccggcgcggcaccgttcactttactaccgggatttattggggtttgccccccgcgccccgcagccggacagcgtggcggtgagctttacgctgcaaagaaattcgtccccgtatgcgttacccgccggcagcctgctggatggcggccaggacagcgccgggaacagcatcacctatcagactgacgacagtctgctgatcaccggccagcaactggaacagttgtgctggacagcccaggttggggagacgtggaaacggtataccgccatcgacagcgcgacgggcgttacgctaccggctgaggggctgcgtctttttaccgcaacaggacaggggaccgacaccaaagagaaggcccccgagctttatctggggttcagcgggacgtctgcgcaggacaccctgtcgctttactggtctgtgcgcgcctcatcggcgctggatgtcacctggtggtattaccaggggaccaaatgggcctcgctggatgccgagctgcaggacaatacagcgtccttgtccgtcagcaacctgtggcgggcgcggctgccggcagacagtcagccggggagcggtctgccacaggacgacgagccgctggaggccgggtattactggatcaaaggcacgctgaaagaaaataaagaggcaaaggacgagaactcgcccgccgaggccatgccgcaactgcaggccgtgctggccaatgcgatgaccgcgaccctgaatgtggcgcaggcgattgatgacagccacttttcccagccgctgccagccaacacgatcaaccagcttgtgacgccagttgccgccatcagcgacgttcgccagcccctgccctcggtaggcgggcagccacgggaaacggagatggcgatgttgcagcgtgccgcgccccggatagcccaccggcagcgggctatcacctggaacaatatgcgcagcctcctgatggagcactacccagagatttttgatgtccgttttcccgatgtggacaaactgagtcgtctcccggcgcttgaggtgcaatcgctgatggttatccctgacggtcgttatggtgataacgatgacgcgctgcgcccggcattgagtaacggaaggttgagccggatggcgcaatggctgtcgcagtacacttcgctgtgggcggcgccgacgctcaagaacccgaaatatatcgatgtgacggctcgctatcgggtgacgttcgtggtggggattcgccctgattatggttatcgtcagctcgcggcgcagttacaacacgactatatgccctgggcgaccgatcgacgccaggcggtaacaccgggcaatcaggtggactactaccagctgctggccacgctgcaacagtcaccgctggtgcagtccgtgaacgcgctggttcttagtcacgacgttattgatgaaacgggaaaacccacatcgatggaaacacaaagtaccgtcaccgccagggatgatgaggtcctgattttgtgcccggaaggagagacccatgtctaaagaaaacgccctgttcccggcggtgaaagacgcgattgtgtttgatgcgctctggcaacaggctcacgagaaagtcactgcgctcagtggtgagatctggacggataccggcgatcacgatccgggcgtcactctgttacagtccgcgacttggaactgttccgacctcagttaccgcgcgtcactgtcgctgaatgacctgctgacccatcaagaccagagcaccttgttcccggaagagttcggtcctgaacaggtgcttacctgtaacacggtgacggcagaggattaccgccgggccttactggacgtgcacagcagcgacattcaggccctggacacccctgagcaggattttttattcagcgatgtcagcctgactcaagaacctaaagagcaccgttttcactggtggtataacgcggaaaaacgcgaatacagcttcaggaagccgacagacagcggtgaagtgaacgaattgaaactgcgggggaatctgtggctttcgctggtcccgacccgctatacccagtccctgtcgcccgagaacctggcggcagtggagcaatgcctggctgagtttcttgcggcgcaccgtaatcttggcgaagtggtgtctcgtattacctggctgcaaccggcgacctttagcccgcggatgacgattgaactggccgataacatcggcgatatcaatcaggtggcggcgcagatttatcaggtcactgacgcgtttttgcgcccggcggtcgcccgttataccaccgaacaacggcgtgcgctcggtgatgccgatgacgccatctttgaggggccgaggctgaaacacggctggcagcaaacggcaccctcgcagatcacctccgggggttacgtcctcaacctcggcccgctggtgaacctgttgctggctatccccggcgtggccagcctgagcaccttgtctgtcgataaaggcgatggccacattacggccgttaccggggacaacttgcgctggcaagtggctgacggctattaccctctgctgtggggggcgccgccgctgagcctgctagcgggtgacgatagtccgttaaccctggtgtcgaaaggcggtattcgcaacacgctggagagtgaggcgatggcgggttacctgacacaggcagacctgatcgtcacaacgcccacggtgttacccgccggccgctttcgtgatcagacgctttatattcccatcgggcagcgtcagcccgaatgctatgccctgcagcagcccgataccgtgattgacgaccagacgcgcgcggtgcatcagtttctgctgcctgtcgaccaattgctggccgacggtacggcagagctggcacagctgcctaccttactggcatttaaaaaccgaggcgacgccattcgggggacccgctggccctatacgaatgcgatggtgcagcaggctattcatcagccctacgcgaaaacgctggaagcaattgcgcagcaggatgcggctatcttcacgcaggataagcagcctgttgggggcaattatgcccgcgaactggattttcttcagtatctgctggggtattttggcacccagcgggccgccctgccgctaacgctggatttgcctgattttctggcgacgcagcgggcgtatctggcgcagcaacccgccttaggttacgaccgcatcaatatccgtattgaccaggtttccgccctgcaaaagcgtattgcggcgcgcatcggccttgacagcatctgctttgctgataatccggacctgggtcaactgccattttacctgattgagcatcgtcagctgctgccccagaccccggacagcacctttgacagtgaacagaccccgtccggttttgcggtggccgaacccgacattacgctgacgcaggcgggcagtgtcggcaaggtggtccaggggcagcttatcgaccttattgcgattgaagggggcagtcgactgcatgtcagccggctgctggttattaaggccgagggggacagttttaccgtcagcacggaaaacagtcagcaactgcacaacaccctgtcacggcttgagacggcctgggcgagtcacaacctgcgctggcaaaacagcaatgtctggctgcaggatatggattaccggctgaattatgctgaggcaaaactgcaaccggctaatccacagcagcgcttactggcgagtaacgcgcaatccccgtatcccgccatggtcagcgtcggtgatggcattgtcctgcgccccgcgggcctacagttttacatgccgggggcaaacgccacccgtgctgccactcttgatgctgactggcagcttgcggcgaccgttaaagcggtcgatccgattgcgggcacgttgcttatcgaaaaagcggccggcagcacagaggattttccctcagcggagagcagcttccgctaccagtgggcgtttagccaggcgaactatgcgacgacagacaggttctcttttgtggtcagcgcggtgctcaatcgccgtctgatagagaaccccaatatcgtgcctgagcagctggttgcctggatacaggaaaccattatggcggagttcccggcccacgtgtccctgattaatcactggcttgatgacgccacctttaacaactttggggtgacctattcgcgctggcaaaacagtggcatgccgctgggcgatgatgcttttgcgctgatgcaaatactgaccctggggcatctccctgttacccaactggacatcggcctgatgcgcatcgccaccgaggagcagcgcaccgaggttatcggtgacggcagccagtggcatgaagacgttattctgcgagaagagctgttctacgtgccgaaagacgtacaaaccaccctttaacatcatgacgaatctggagagcaaaatgacggacaaaacccctaagaaaacggcagaaaccccagtgaatacccaggcgaccttagccgacacaacggacacagcgcgtgacagcgagccaaagagcagagccttgccccaggccgatgcgctgaaggcgcgctttaaggcgggcagtattccgctgcagacggactttgcggacctgattgatctggccaatatgggacgtcaggcggtgggcggagcagaggggcaaaccgggccggcaaatgggtttaccctttcatcggagggccttcttgaattaaaacccaatgcaactaaagggattgtggttgataaagacggcattgccgtcaaggcagaggcaagtaaggggcttcaggtcaccagcaacggtgtaggcgtacaagccgggaatggcgttgcggttaatggtagtggcgtgaacgtaaaactggcgaacgggactgctagcgtcactacgggtaatgccggcggattgacgttagctgcggcgggcttatccgtacaggccgggagtggtattagtgttgccaacaccggcgttgccgtacaggccgggaatggtattagtgttaccagcactggcgttgccgtcaaggcggaggcaagtaaggggcttcaggtcaccagcaacggtgtaggcgtacaggccgggaatggcgttgcggttaatggtagtggcgtgaacgtaaaactggcgaacgggactgctagcgtcactacgggtaatgccggcggattgaatttagctgcggcgggcttatccgtacaggccgggagtggtattagtgttaccagcactggcgttgccgtcaaggcggaggcaagtaaggggcttcaggtcaccagcaacggtgtaggcgtacaggccgggaatggcgttgcggttaatggtagtggcgtgaacgtaaaactggcgaacgggactgctagcgtcactacgggtaatgccggcggattgaatttagctgcggcgggcttatccgtacaggccgggagtggtattagtgttaccagcactggcgttgccgtcaaggcggaggcaagtaaggggcttcaggtcaccagcaacggtgtaggcgtacaggccgggaatggcgttgcggttaatggtagtggcgtgaacgtaaaactggcgaacgggactgctagcgtcactacgggtaatgccggcggattgaatttagctgcggcgggcttatccgtacaggccgggagtggtattagtgttaccagcactggcgttgccgtcaaggcggaggcaagtaaggggcttcaggtcaccagcaacggtgtaggcgtacaggccgggaatggcgttgcggttaatggtagtggcgtgaacgtaaaactggcgaacgggactgctagcgtcactacgggtaatgccggcggattgacgttagctgcggcgggcttatccgtacaggccgggagtggtattagtgttgccaacaccggcgttgccgtacaggccgggaatggtattagtgttaccagcactggcgttgccgtcaaggccgggaatggtattcaggtcaatacgaacggtgtggggctaaagagcaccgcctggataaacgtgatgtgtggacttcataatgccactttctatgtgtacagcagttacttttgcgcattcttttgtaattattctaatggctgcgttgcatatgtatacggtcgaggagctttttatctgtccacagttagtggtgatatcaaattgaattcagtctctcccaatcaaatattagcaatgacgggaggttcatcatcagcggtaaccatgatgtcttggacatcaacgaaagctgctgagggtatttcattagaataccaaaggaagagcttaataaattctagcagtattagtggcagcgcatcattggtttccgcaccataatgactagaaattttttatatactcccagtattactatacaaaagtgtcgtgttaatgtggtttctctgtcgccagagaaacaccggctacatgcttatttatttaccagggagaatatcagtaaattattatccctggctataaataagcatcggacagaggagagcatccatattaccaaactggtgcttaatttaggcgttattccggaaggacacttttcgacgctgtttaaccaacgatttgcgcaggcgttagagcaatgtatggaacagttagccactcaggctcatacacaaaacacacggcttgctcatgctacaccagccgagttgctggcgcacgttgaaagtaatcctgaggcgctcaccccattggctatttgctgcctgcaacagacctcgttgctgcaattgttacaaaacgggcaaccccagtatttgcggggtttattaaaacgactgctacaaagggaagataagcactcgtcagcgttagtggatacttgttatagccgggtgaccgccagccgtttagggatagcggcgctgtgctacctgcagcatcaggcgcaaggacatgactggctgagtcagcatacccccccagccagtcaagtgattagctgggcaaaggcgattgctcagggtgaaattccacctgaacagcttgcgcggttaatgaccggcaattggccttccgatagcgcattgcccgagcaacgagcctattcccccttggtcgtgatgcgttggttgttgccactatggcgacaacccgccgtgcgccaggtgattcatcgactgaaaggagggcggggggtgcaattggttgatgcttatctgagtcgttgtttacaactgcaggatgatgacgccatgcgggaggaagaagggatgcatccagacctccagcaggttgagctaccgctcgataacaccgtgttgctggagggcgaggaggagcataccgtgcgggatcatgccacgttgccgcagggcaaggagaggccgtccgatcccaaacgggttgcactactgcgggataacgccacattgccggggagtgaggagatgccgacaacatctcggtgcacgatgcaaccgagggaaggcggtctccgctcgccgaatgaacagctctcgccgagtcaggatatcagcaatgccggtttgctccttctgtggccgcttttgcctcagctgttttccctgctgggtctgcgggaggaagagcggtttgtcagcgatgcggcgcggtggcaggccgtgtacggtctcgatcgattggtctggggggaggttaacccgacggaggaccggttgatgttgaatctggtgttatgtggggtgtccggctcaacctccgtaacgccgccgacaccgctgagtctgctgcaactgcaacagattgacgcctggctggccgctatcggccaacaacttcccggttggcaaaaattgagcctgatggatattcggcagttgttcttgcagcgggcaggtgaaatcagcatggaaggagcattcccccaaattagtgtgcggccggaaccctatgatttcttactcagagattggccgtggccaatgacgctggcgtctttcccctggactgaacagccactgactatcgtctggccgctaaccgatttcacaggataaaacagccgctattttctcttcttatcggatatcaacatgacgctttcttcaacctttcagcccgcgtttattccgcagggtgattgccagctatcgctattattcagcgagctggaacgcatcgatctgctattacagcattattattaccgccattcagcacgtcacgaggattttaacgcgtttctgcttagcgaagaggaggttgaggcgcgaatgaaacaccctgtcggcaggcctcattgggccgctgccacgccgccgatttaccggacggaaaacgggcagccattgttaaccgaaggcttaacggacctgattaatcgtttcgaactcactgattttgaaagagacacggtgttattgggattgctgccccattttgacagtcgctattatgagctgttttcctggatccaggggggaaagcaaagtcaactgcccagtttttcattggccttaacgctattttgtccttcagatagggagagacgggcacagcaagccagttttttgcatcgggcaccgttaatgagctgtcagctattaacgattgaggagaataaaaaaaatccggcatggagccacacccgctttatgaccgacagcagtgtgtaccattttttactcgggcatcattatctggcgccggcgttagcgtcatgggctgaatggccaatccccccggcgttgcctttttatcctgccggcttaaaacacgcgctggcaggcgtgttactgactgacgatatcgagccgcgccccgtggtgttgctgcgcggcatgccgggtagcgccagagcccatgcggtgtcgagcatttttgcctctgaaaaccggcagacgctgcaggttgatatcgataagtgcaccgagagtgatgacgatgcgctgctactgcatttaacctgtctgatgcgcgaagcccgtatgcgcggcgcgggaatggtgatccgcaacctgcaggcacggatggaaaagagcacgtcactgccggagaggttatctgagcacctgaaccagccgggattaagggtggtgtgcctggtcgaaccctatgccccgcctttatggctgaaaaaaacgcccaccttgcagacagagatgccggtgttgacgcaggaggaaaaaacgcacctgctcatgggttgtctgcctgaacgacgcgcggcggatattgatcttatcagtttaagccagcgctacacctttaccccggaaagtctgccgctgattgtgcaagaggccgaactgtatcggcagcaacgtgacccggcggatgttctgcaacagtgtgatattcgtcaggcgctcaatttacgcacccaacagaactttggcgcgttagcgcaacgtattacgccgaagcggacgttaaacgacctgttggtgtcagagagtctcttgcagcaactccaggagatgttgacggccatccgctatcgggaaaaagtcctggccggcggttttaaagataaggtgggctacggcgtcgggatcagcgcgctgttctacggcgactcgggaaccgggaaaaccatggcggcggaagtgctcgcccataccctgggggtggatttaatcaaggtagatctctccacggtgatcaataaatacattggtgaaaccgagaaaaacctctcccgtatctttgatttggcagagcaggatgccggtatcttgttctttgatgaggccgatgccttatttggtaagcgcagtgaaaccaaagatgctcatgaccgtcatgccaatattgaagtgtcttacctgttacaacggctggagaattttcctgggttggttattttatccaccaataaccgcagtcacctcgacagtgcgtttaatcggcgatttacctttattacccgctttacttatccggatgaaacgttgcggcataaaatgtggcaaaaaatatggccgaagcacattaaggtttcaccggacgttgattttgaaaaattagcgcagcgagcaaatatcaccggcgcaaatatcaggaacattgccctgttagccaccttctttgctgaagaaagtggcaatcaagaagtcagtcacagccatatcgacgcggcgttaacccgtgagttggctaaaacagggcggcttgcgctgtaacctgctgcctaaacagccagaacacacaacaccatcatggacagtgatgacttactattaatgcagaggaatgagtatgtctaattatcaaacgctggtcgacgtgaataacgcgatgaataagatgttgcgcgcttatgtgaatgaggccgtggcaatccgctttgatttaccggatgtggatgccacgcaggcagatgccgcgataagcgtgtttctttatgatatccacgaagacctgcagctgcgtactgcagagtcccgcgggtttaatgccggcgcaggacggttattacccggttgggtcaacgtgaagtgcaactaccttattacgtattgggaatcaaccggccccgccacggatgccgacaacccggacagccagcccgacaaccaggctatccaggtgatgtcccaggtcctggcggcgttgattaacaaccgccagttagccgatatccccggggcttacacgcaggttatgccgcccaaagaaaacctgaatagcctgggtaacttctggcagtcgctgggcaatcgcccacgtctttcgctcaactattgtgtcactgtgccgattagcctgagtgataaaggcgaggaaatgaccccggtgaaatccttgtctaccaccgttgagccaaaagcgcccctttctccactggtcattacagatgcactgcgggagcaattgagggtggcgctagggggcgattatgatgcctgtcttgctatgacgcacgttaatctggactcctcaccggttgccaattcagacgggagtgcggctgaaatcagggtgtcgttgcgggtttacggtatgacgccgacagaatatcttgccccgatgaacactgtttttaatgaatgggaaaagagtgaagctgcggcggtcacgcccgatggctaccgtgtttatatcaacgcggttgataaaacagacctgactggtatttaaataaattctgatgtgaaaatttaaaagcataccgcacgctaattaatattaatcagtggtgagtttgcatttacaccccgtcatttatttaaaagaggtatatttatgccgactaaaacaccacagttacagctggcgatcgaagaatttaataaagcaatattacgggctgcagaatatgaatggaatattgaaaataatatttacgataaagttcacacacttttcccagcagcagataaatctctaaaagagagtgtggtcgcgcagagcgttgaaaaaatatctgaggaaaaccaggcgtttgagtttaaccacttgggtaacgatctccttgaatttccggcagtagaatatattgctcgttcttttttacgcagaatactggaaaaactggctatttatcaagctagagatccatcatttactataacgaaaaccaatcaggatgccgggataggtttcttggaagggtgggaaagcgataacgcgaaatgggcaaagcaaatgaacgcgctgctgaatgaaagcaaggttaacgcccgcgttttgaccagcctggcatacagctatatccgcttttttcgcccgctgaagacattgcgcaagctgggaggggaggctaatgagtctttgctgaacagcaaagaagccaacccgcgtctggatatttttgccagctcaacggcgggagcgccgccggtcatgtcgaagccgatcaccactcagcctcacggctgggtgtggctaaaatacgccgactggaacgccgcggaagcgttgggtatcaaaacgtccacggatttaattggcagccggccaagcagcgaccagcataaaggtacaggcttcaagtttaagggcatgctgcaggcgataaagccgccgctgtatcgacgccattcattttcccttagggaacgcgacgaacatgaatcggggtacggcggtttcgttatcaacgataagtcgatgacctcaataggggcagaaaaaccgttggtggtgaattggcgtcagcagaacatggataaaaagctgccgatgttttccggcccgtccagcaccacttcctatatgtatgaaattgcccgtttgctgaatctgcctgctgctgaaacacaggtatctacgttttcgataattcggctctgtcaagtatttaggtcagagtgtaactaatagttttgtcacattagcgtaggtcagataccagcgaatacactgaatatgcagccacaggaagagatgatggcagagtgcgatattgtcgcgtcgtatcgctgcattatccgcatggtaaaaagaagacacttaactttcattcggtcatagcgcttttcagagtccagtcgtcaataatccaatcgtgaggacagttttatgccttactccagtgagtcgaaggaaaaagaaacacactcaaaagaaaccgaaagagataatgctgacccagtatttcaacgggtcagccagggcggcgtgggtgtttcaccgcctgatgaggggggagacttgtcggccggaagtaacaatgaccatttattcgcttttattcgtgaaacacacttggaagaagcccaggaattcaggctaaaagggtataacagccaggtgcccgaggttgacgagggattactgacgcagctgcgtgacgacctggcggcggccaaatcccgccagtacgttcaggcaagcgttggggggccgctgggttctcggtggctgctggaacagataggcaaaatagagcggctgacggacaagttttctgacgaagtaataaaacgctgggttaagcatgagctgccacgaaaaaacgtaggggaagccgcggggaccgagttggggagccggcgtagggctcagtcgctggccagacggttggagtcaaccatgcagacactgatccgcgttgtccataccctgcatgctatggatgactacagtaccccggaaaaacggcacgacatgctggtcgctgagcttaccggcgcgttctcctccagtgataaaaatacggtgatacaggcgctggggagaatgacggcagagacgtcaggtcatgccgcctgggcttcccttatgcaggcccggacagcggcgtgggaggccggtaagtcagccaccgtcgatgcgatgattgcgacttcacagcacgaagcagaaaaagccaataaaaaagcccgtgagcttcagggcgattcacaggctttctttagtcatgtcgccgcctatcttcagagcctctccagcgatttggcaaaagtgtcgattaacatggggcagagcacctcttcctcgactatacggaacgaagcagaaaaagccagtgagcttcagggcgattcacagactttcgttagtcatgtcgccgcctatcttcagagcctccctagcgatttggcaaaagtgccgattaacatgtggcagaatatggattttgttaagacaaaattacaagcgcaaactgcagttgcgggaatgaaagtgcatgcgcaccggcttgtccggatcgcacagcatggtcactccaccaaaacccctgcgaaggatcccgaacaggtcgttaccgattccatcatcagaagcattttatggctgtggcagcagccggccatcaaaatccagtgcgccagcactgcgttgttgtcaaaagtgggtgagctgaaaaaaattgaggggatactggcttcttacgccgtgacggatgagctgggaaacgaacaagaacgccgcaaccctccgggtgaggaggacctggatgcacagctcagggaatgggtgagcgccagccttaagcaggaaaaccccgaaaaccagcgggcggtaaaagtggtgacgctggagcggctgctgggcggtgatatcgccagtgcccgcaacctggtggaacgtctgggaaaagcggaagagggtattcagaatctgctcaggcggcagcaggttgctgtcctgaaaatgtcagttgagcgcttgcctgccgctgtttcctctctgaaggccgtggataaattactgccggatttggcaggtgacctcacggcgagtatcgccgccctgagcaacgcccttcaggcagccgaataccccgcccgcgactttagcgaagcaaaaatacaggccggctatgcacaattgtgggcgacaaaggtgaaggaaagtctgtcggcagcgtctgcacggctgaccgaaagaccgctggatgaacattcacggggcgcacgccttgccaaacattgggcaaacctcgccaaagaacggagcgtgggtaattatccgccgccggatgcacagcaggtacttgcctccctgaaggaacaggggctattagcggggaccctttcaaccggagatccggccgggtatcttttcgccacccggcttgccggtgagcttgaaaatgccggtaatggtgaattgcgattaccgatgagtccggagcaatatgttgctttagagaagggacttgttgagtatattgtaaaatggggacaacggcggatctcacaaggagtcacccgcattgttattgagttgtcctttgagcaggctctggatacggtatcgttcaacgtgtccaagctcttccggttaccttataaggtgctgaaggcctcgataaaaataccgtacaatgtcaataaggttaataattataccatgccgggccatgataagccctataaggcaatttatggcttgctgggaaaaaagcttaagcaacttggctttaatttactgacggcacccgtgcctggcgtgatgaaacttgtggctggcaccgggataaccgcaggtgcaggcgtgcataatttacgtgtcgaaaatagagagaaaacattcagcgcggtttatcaacacgtggtggaaggaaagcaaagtgaaaaaataaaaatggactccgtgaagtcgatgatttttgattcagtgctcgataccgccactacggccgcttttaaagggggacgaagagcctggcaatcaggaagaaataaaaacgacattgaaatcaatgaggtaacactttctcaagcacagcagcgccaagtggcagccaacaatgttgacactgcatgggggaatgctgctgcgaatgagaggaaggttgagccagtgagtcattcatcaccattacagcaacaaaccgatgttaggccgttctctgataagagtgaccaggatgctgctcaacctcgagtacgtaaacgggcagtggcggatatggctccccctccccctcatcaatggcataataacattcctgccaacacgacgctacagtcagaacattttgattttgatcgtgacatacgttatcagggcttctccgatgagaagaaaaaacaaacctatttacatggtattcaacttgtattgcttcagatacaaaatgatggacgctttgcacagaagatcaggaataatgcctaccttgccagtataggcgtttcgaacttagtacctgtcgatatagaaggatataaacttaaaaatacatttcttcttcctgatagcccaagtgctaaatctggagttattgttcgcttagattctgaaaatccttattactatgttggcaaagggagtgatcttttagaagacatcaaatgggccatgcctcatgatgctaatgaacagaagtatgaatatatgcctgattctgatgggaacgctcacttttaccgtctgcgcaacggttttgatatctttaatgatattaggatggggaattcaagtttcgaatatttctttaattataataatccggagccgataagcatcacgagactttcttcatatcttgcaaatactattgagggtgactataaaaacggatcgtcgcccccaaaaaacaaactattaatttccagagcgattactggtgctcatattcctgacccaggggtcactgcaaccgccgctggatatcatatcgaattcacctgggataatttgacttcagcagagtatctgaggtcattttcaaggcccttctctaccctcagtggagaaatgcagttagtgtctagctccattaatggagaaacgatacaggaaacagagctgcatgttcatcaggctgaatatataggaagctgggttgatgctactgtcggggccatcacatctttcacgccggagggatgggttctcaataccacactatcggcagcggacattgctgctgatttgacagaagataaggatcctgacccaatggcggttgctggcctggttgtaggatgcattcctggtggtcggattgcagctaaagtcggaaagttcacccgtattggcggtaaggttgttaaatacgggcttatgcttggcaataaagcggtcgacctggccatcgtagggaagagcgttaagatagctgtagacacgggtgatccactcgcaatttataaggcgcttctgatcagtggcataggtactacgaattcttacgatatggcaaagaatatgtcatcaaagctaaaaatcagcaagaaactggaagacagtgttcaattagataaaccactacaaaatctaaggggaggaagcaagcgtcctgaagagggtgaatcaacctcgcagaagcgttcacagccagatgagagtccagaaaatagtcaggaggctgtatattcaggcccctccggcagagctcgggtgacttttgaccagacgaccgaacatcatatataaggatcctctagagtcgacctgcaggcatgcaagcttggctgttttggcggatgagagaagattttcagcctgatacagattaaatcagaacgcagaagcggtctgataaaacagaatttgcctggcggcagtagcgcggtggtcccacctgaccccatgccgaactcagaagtgaaacgccgtagcgccgatggtagtgtggggtctccccatgcgagagtagggaactgccaggcatcaaataaaacgaaaggctcagtcgaaagactgggcctttcgttttatctgttgtttgtcggtgaacgctctcctgagtaggacaaatccgccgggagcggatttgaacgttgcgaagcaacggcccggagggtggcgggcaggacgcccgccataaactgccaggcatcaaattaagcagaaggccatcctgacggatggcctttttgcgtttctacaaactcttttgtttatttttctaaatacattcaaatatgtatccgctcatgagacaataaccctgataaatgcttcaataatattgaaaaaggaagagtatgagtattcaacatttccgtgtcgcccttattcccttttttgcggcattttgccttcctgtttttgctcacccagaaacgctggtgaaagtaaaagatgctgaagatcagttggggcaaactattaactggcgaactacttactctagcttcccggcaacaattaatagactggatggaggcggataaagttgcaggaccacttctgcgctcggcccttccggctggctggtttattgctgataaatctggagccggtgagcgtgggtctcgcggtatcattgcagcactggggccagatggtaagccctcccgtatcgtagttatctacacgacggggagtcaggcaactatggatgaacgaaatagacagatcgctgagataggtgcctcactgattaagcattggtaactgtcagaccaagtttactcatatatactttagattgatttacgcgccctgtagcggcgcattaagcgcggcgggtgtggtggttacgcgcagcgtgaccgctacacttgccagcgccctagcgcccgctcctttcgctttcttcccttcctttctcgccacgttcgccggctttccccgtcaagctctaaatcgggggctccctttagggttccgatttagtgctttacggcacctcgaccccaaaaaacttgatttgggtgatggttcacgtagtgggccatcgccctgatagacggtttttcgccctttgacgttggagtccacgttctttaatagtggactcttgttccaaacttgaacaacactcaaccctatctcgggctattcttttgatttataagggattttgccgatttcggcctattggttaaaaaatgagctgatttaacaaaaatttaacgcgaattttaacaaaatattaacgtttacaatttaaaaggatctaggtgaagatcctttttgataatctcatgaccaaaatcccttaacgtgagttttcgttccactgagcgtcagaccccgtagaaaagatcaaaggatcttcttgagatcctttttttctgcgcgtaatctgctgcttgcaaacaaaaaaaccaccgctaccagcggtggtttgtttgccggatcaagagctaccaactctttttccgaaggtaactggcttcagcagagcgcagataccaaatactgtccttctagtgtagccgtagttaggccaccacttcaagaactctgtagcaccgcctacatacctcgctctgctaatcctgttaccagtcaggcatttgagaagcacacggtcacactgcttccggtagtcaataaaccggtaaaccagcaatagacataagcggctatttaacgaccctgccctgaaccgacgaccgggtcgaatttgctttcgaatttctgccattcatccgcttattatcacttattcaggcgtagcaccaggcgtttaagggcaccaataactgccttaaaaaaattacgccccgccctgccactcatcgcagtactgttgtaattcattaagcattctgccgacatggaagccatcacagacggcatgatgaacctgaatcgccagcggcatcagcaccttgtcgccttgcgtataatatttgcccatggtgaaaacgggggcgaagaagttgtccatattggccacgtttaaatcaaaactggtgaaactcacccagggattggctgagacgaaaaacatattctcaataaaccctttagggaaataggccaggttttcaccgtaacacgccacatcttgcgaatatatgtgtagaaactgccggaaatcgtcgtggtattcactccagagcgatgaaaacgtttcagtttgctcatggaaaacggtgtaacaagggtgaacactatcccatatcaccagctcaccgtctttcattgccatacggaattccggatgagcattcatcaggcgggcaagaatgtgaataaaggccggataaaacttgtgcttatttttctttacggtctttaaaaaggccgtaatatccagctgaacggtctggttataggtacattgagcaactgactgaaatgcctcaaaatgttctttacgatgccattgggatatatcaacggtggtatatccagtgatttttttctccattttagcttccttagctcctgaaaatctcgataactcaaaaaatacgcccggtagtgatcttatttcattatggtgaaagttggaacctcttacgtgccgatcaacgtctcattttcgccaaaagttggcccagggcttcccggtatcaacagggacaccaggatttatttattctgcgaagtgatcttccgtcacaggtatttattcggcgcaaagtgcgtcgggtgatgctgccaacttactgatttagtgtatgatggtgtttttgaggtgctccagtggcttctgtttctatcagctgtccctcctgttcagctactgacggggtggtgcgtaacggcaaaagcaccgccggacatcagcgctagcggagtgtatactggcttactatgttggcactgatgagggtgtcagtgaagtgcttcatgtggcaggagaaaaaaggctgcaccggtgcgtcagcagaatatgtgatacaggatatattccgcttcctcgctcactgactcgctacgctcggtcgttcgactgcggcgagcggaaatggcttacgaacggggcggagatttcctggaagatgccaggaagatacttaacagggaagtgagagggccgcggcaaagccgtttttccataggctccgcccccctgacaagcatcacgaaatctgacgctcaaatcagtggtggcgaaacccgacaggactataaagataccaggcgtttccccctggcggctccctcgtgcgctctcctgttcctgcctttcggtttaccggtgtcattccgctgttatggccgcgtttgtctcattccacgcctgacactcagttccgggtaggcagttcgctccaagctggactgtatgcacgaaccccccgttcagtccgaccgctgcgccttatccggtaactatcgtcttgagtccaacccggaaagacatgcaaaagcaccactggcagcagccactggtaattgatttagaggagttagtcttgaagtcatgcgccggttaaggctaaactgaaaggacaagttttggtgactgcgctcctccaagccagttacctcggttcaaagagttggtagctcagagaaccttcgaaaaaccgccctgcaaggcggttttttcgttttcagagcaagagattacgcgcagaccaaaacgatctcaagaagatcatcttattaatcagataaaatatttgctcatgagcccgaagtggcgagcccgatcttccccatcggtgatgtcggcgatataggcgccagcaaccgcacctgtggcgccggtgatgccggccacgatgcgtccggcgtagaggatctgctcatgtttgacagcttatc

SEQ ID NO: 21 - protein, 149 aa, Serratia entomophila; identical to SEQ ID NO: 2

SEQ ID NO: 22 - protein, 354 aa, Serratia entomophila; identical to SEQ ID NO: 3

SEQ ID NO: 23 - protein, 451 aa, Serratia entomophila; identical to SEQ ID NO: 4

SEQ ID NO: 24 - protein, 417 aa, Serratia entomophila; identical to SEQ ID NO: 5

SEQ ID NO: 25 - protein, 149 aa, Serratia entomophila; identical to SEQ ID NO: 6

SEQ ID NO: 26 - protein, 54 aa, Serratia entomophila; identical to SEQ ID NO: 7

SEQ ID NO: 27 - protein, 228 aa, Serratia entomophila; identical to SEQ ID NO: 8

SEQ ID NO: 28 - protein, 528 aa, Serratia entomophila; identical to SEQ ID NO: 9

SEQ ID NO: 29 - protein, 140 aa, Serratia entomophila; identical to SEQ ID NO: 10

SEQ ID NO: 30 - protein, 139 aa, Serratia entomophila; identical to SEQ ID NO: 11

SEQ ID NO: 31 - protein, 607 aa, Serratia entomophila; identical to SEQ ID NO: 12

SEQ ID NO: 32 - protein, 961 aa, Serratia entomophila; identical to SEQ ID NO: 13

SEQ ID NO: 33 - protein, 636 aa, Serratia entomophila; identical to SEQ ID NO: 14

SEQ ID NO: 34 - protein, 535 aa, Serratia entomophila; identical to SEQ ID NO: 15

SEQ ID NO: 35 - protein, 696 aa, Serratia entomophila; identical to SEQ ID NO: 16

SEQ ID NO: 36 - protein, 293 aa, Serratia entomophila
MSNYQTLVDVNNAMNKMLRAYVNEAVAIRFDLPDVDATQADAAISVFLYDIHEDLQLRTAESRGFNAGAGRLLPGWVNVKCNYLITYWESTGPATDADNPDSQPDNQAIQVMSQVLAALINNRQLADIPGAYTQVMPPKENLNSLGNFWQSLGNRPRLSLNYCVTVPISLSDKGEEMTPVKSLSTTVEPKAPLSPLVITDALREQLRVALGGDYDACLAMTHVNLDSSPVANSDGSAAEIRVSLRVYGMTPTEYLAPMNTVFNEWEKSEAAAVTPDGYRVYINAVDKTDLTGI

SEQ ID NO: 37 - protein, 358 aa, Serratia entomophila; identical to SEQ ID NO: 18

SEQ ID NO: 38 - protein, 1437 aa, Serratia entomophila
MPYSSESKEKETHSKETERDNADPVFQRVSQGGVGVSPPDEGGDLSAGSNNDHLFAFIRETHLEEAQEFRLKGYNSQVPEVDEGLLTQLRDDLAAAKSRQYVQASVGGPLGSRWLLEQIGKIERLTDKFSDEVIKRWVKHELPRKNVGEAAGTELGSRRRAQSLARRLESTMQTLIRVVHTLHAMDDYSTPEKRHDMLVAELTGAFSSSDKNTVIQALGRMTAETSGHAAWASLMQARTAAWEAGKSATVDAMIATSQHEAEKANKKARELQGDSQAFFSHVAAYLQSLSSDLAKVSINMGQSTSSSTIRNEAEKASELQGDSQTFVSHVAAYLQSLPSDLAKVPINMWQNMDFVKTKLQAQTAVAGMKVHAHRLVRIAQHGHSTKTPAKDPEQVVTDSIIRSILWLWQQPAIKIQCASTALLSKVGELKKIEGILASYAVTDELGNEQERRNPPGEEDLDAQLREWVSASLKQENPENQRAVKVVTLERLLGGDIASARNLVERLGKAEEGIQNLLRRQQVAVLKMSVERLPAAVSSLKAVDKLLPDLAGDLTASIAALSNALQAAEYPARDFSEAKIQAGYAQLWATKVKESLSAASARLTERPLDEHSRGARLAKHWANLAKERSVGNYPPPDAQQVLASLKEQGLLAGTLSTGDPAGYLFATRLAGELENAGNGELRLPMSPEQYVALEKGLVEYIVKWGQRRISQGVTRIVIELSFEQALDTVSFNVSKLFRLPYKVLKASIKIPYNVNKVNNYTMPGHDKPYKAIYGLLGKKLKQLGFNLLTAPVPGVMKLVAGTGITAGAGVHNLRVENREKTFSAVYQHVVEGKQSEKIKMDSVKSMIFDSVLDTATTAAFKGGRRAWQSGRNKNDIEINEVTLSQAQQRQVAANNVDTAWGNAAANERKVEPVSHSSPLQQQTDVRPFSDKSDQDAAQPRVRKRAVADMAPPPPHQWHNNIPANTTLQSEHFDFDRDIRYQGFSDEKKKQTYLHGIQLVLLQIQNDGRFAQKIRNNAYLASIGVSNLVPVDIEGYKLKNTFLLPDSPSAKSGVIVRLDSENPYYYVGKGSDLLEDIKWAMPHDANEQKYEYMPDSDGNAHFYRLRNGFDIFNDIRMGNSSFEYFFNYNNPEPISITRLSSYLANTIEGDYKNGSSPPKNKLLISRAITGAHIPDPGVTATAAGYHIEFTWDNLTSAEYLRSFSRPFSTLSGEMQLVSSSINGETIQETELHVHQAEYIGSWVDATVGAITSFTPEGWVLNTTLSAADIAADLTEDKDPDPMAVAGLVVGCIPGGRIAAKVGKFTRIGGKVVKYGLMLGNKAVDLAIVGKSVKIAVDTGDPLAIYKALLISGIGTTNSYDMAKNMSSKLKISKKLEDSVQLDKPLQNLRGGSKRPEEGESTSQKRSQPDESPENSQEAVYSGPSGRARVTFDQTTEHHI

SEQ ID NO: 39 - DNA, 25944 bp, Serratia entomophila
  primer_bind 1283..1305: note = primer pBAD33_lin_Nhel_RV
  primer_bind 1286..1340: note = primer afp1_pBAD33_with_RBS_FW
  primer_bind 8382..8424: note = primer SEAfp8-9_merge_F2_RV
  primer_bind 8406..8435: note = primer SEAfp8-9_merge_F1_FW
  primer_bind 21855..21938: note = primer Se_Afp1-17_pBAD33_RV
  primer_bind 21919..21940: note = primer pBAD33_lin_BamHI_FW
  source 1..25944: mol_type = other DNA
  CDS 1320..1769: note = Afp1
  CDS 1788..2852: note = Afp2
  CDS 2872..4227: note = Afp3
  CDS 4267..5517: note = Afp4 without STOP codon
  CDS 5520..5966: note = Afp5 without STOP codon
  CDS 5969..6130: note = Afp6 without START and STOP codon
  CDS 6133..6816: note = Afp7 without START and STOP codon
  CDS 6819..8405: note = Afp8 without START
  CDS 8426..8845: note = Afp9 without STOP codon
  CDS 8848..9267: note = Afp10 without START codon
  CDS 9344..11164: note = Afp11 without STOP codon
  CDS 11166..14051: note = Afp12 without START amino acids MS
  CDS 14077..15987: note = Afp13
  CDS 16044..17651: note = Afp14
  CDS 17688..19778: note = Afp15
  CDS 19855..20736: note = Afp16
  CDS 20842..21918: note = Afp17
atcgatgcataatgtgcctgtcaaatggacgaagcagggattctgcaaaccctatgctactccgtcaagccgtcaattgtctgattcgttaccaattatgacaacttgacggctacatcattcactttttcttcacaaccggcacggaactcgctcgggctggccccggtgcattttttaaatacccgcgagaaatagagttgatcgtcaaaaccaacattgcgaccgacggtggcgataggcatccgggtggtgctcaaaagcagcttcgcctggctgatacgttggtcctcgcgccagcttaagacgctaatccctaactgctggcggaaaagatgtgacagacgcgacggcgacaagcaaacatgctgtgcgacgctggcgatatcaaaattgctgtctgccaggtgatcgctgatgtactgacaagcctcgcgtacccgattatccatcggtggatggagcgactcgttaatcgcttccatgcgccgcagtaacaattgctcaagcagatttatcgccagcagctccgaatagcgcccttccccttgcccggcgttaatgatttgcccaaacaggtcgctgaaatgcggctggtgcgcttcatccgggcgaaagaaccccgtattggcaaatattgacggccagttaagccattcatgccagtaggcgcgcggacgaaagtaaacccactggtgataccattcgcgagcctccggatgacgaccgtagtgatgaatctctcctggcgggaacagcaaaatatcacccggtcggcaaacaaattctcgtccctgatttttcaccaccccctgaccgcgaatggtgagattgagaatataacctttcattcccagcggtcggtcgataaaaaaatcgagataaccgttggcctcaatcggcgttaaacccgccaccagatgggcattaaacgagtatcccggcagcaggggatcattttgcgcttcagccatacttttcatactcccgccattcagagaagaaaccaattgtccatattgcatcagacattgccgtcactgcgtcttttactggctcttctcgctaaccaaaccggtaaccccgcttattaaaagcattctgtaacaaagcgggaccaaagccatgacaaaaacgcgtaacaaaagtgtctataatcacggcagaaaagtccacattgattatttgcacggcgtcacactttgctatgccatagcatttttatccataagattagcggatcctacctgacgctttttatcgcaactctctactgtttctccatacccgtttttttgggctagcaggaggaattcaccatggctattaccgcagacgacattgcagtgcaatatccaatccctacttatcgctttattgtgaccctgggcgatgagcaggtgccgtttaccagtgcttctggtctggatattaattttgacaccattgaataccgggacgggaccggcaattggttcaaaatgcccggccagcgacaggcccctaacattacgctgagtaaaggagtatttccgggcaaaaatgcgatgtatgaatggattaacgccattcaacttaatcaggttgaaaagaaagacatcatgatcagcctgaccaatgaagccggcacggaagtgctggtcagctggaatgtgagcaacgccttcccgacctcactgacctccccgtcatttgatgcgaccagcaacgaaatcgcggtacagcaaatcacgctcatggccgatcgcgtgaccattcagactgcctaatcaagaggacatgttgccatgactgtgacaaccacttatcccggcgtttatctcagtgaagatgccgtatcgagcttctcggtcaacagtgccgccaccgccgtgcccctgtttgcgtacgacagtgaaaataccaacaccattaataaaccgattcaggttttccgcaactgggcggaatttaccgtcgagtacccaacgccgctggaagacgctttttataccagcctgagcctgtggtttatgcacggtggcggtaaatgttatctggttaacgaggccaatatcgccgacgcggtggcgcaatacgatgatattacgctgattgtcgcggcagggacagataccactacctataccgcgttcaccacagtagtgggccagggctaccgtatttttggcctgtttgacggtccgaaagagaaaattgccggcacggcgaagccggatgaggtcatggaagaatatccgacctccccgtttggcgcggtattttacccgtggggcaccctggcatcgggggcggcggtgccgccgagcgccatcgccgcggcctccattacccaaaccgaccgtacgcgcggtgtgtggaaagcgccggccaaccaggccgtgaatggcgttacccctgcgtttgctgtcagcgatgatttccagggtaagtataaccagggcaaggcgctgaacatgatccgcacattctcgggccagggaacggtggtgtggggtgcccgcacgctggaggacagtgataactggcgctatatcccggttcgccgcttgttcaacgcggttgagcgggatattcaaaaatccctgaataaactggtgtttgaacccaacagccagccgacctggcagcgtgtcaaggccgccgtagacagttatctacacagtctgtggcagcagggcgcgttggccggtaatacccccgctgatgcctggtttgttcaggtcggcaaagatctcaccatgacccaggaagagatcaatcaggggaagatgatcataaaaatcggcctggccgcagttcgcccggcagaattcatcatcctgcagttcagccaggatatcgcgcaataattcactgaaggaaaagaacatggctactgtcacatctgtaccgggtgtctatattgaagaagatgcctcgccagcgatgtcggtgagcgcgagtgcgaccgccgtgccgttatttgtcgctcgttttacccctctcaagccagaactggcgggcgtgatcacccgcatcggcagctggctggactataccatcctgtttgacagcaacgtgccttcttccgcacgcgttaccgtgtcgtcaacggcggttgaaccgtcccctgaattcgatgcgctggaaacagcgtcgtctaaagcgacaacgacatatacctaccagattgatgatactgaggtcgtggatccgacggcctccgtcgccctgcggctctatttccagaacggcggcggcccctgctacctctatccgctggaaaaggcagacgataacggcccattggccgcgttgccggacctcatcgacgaggtcggggagatcacactgctggcaagtccggatcccgatgagacttaccgtactgcggtgtatggcgcgctggctgcctcactagatcagcacaaagggtacttcctgctggccgacagcgtcaatggcgacgcgcccagtgcggtcggtggttccgcccaggtggcggtgtattacccgaatgtagaagtgccgcacacccgtaaactggatgacgcagaggttgccatcgacggttacctcgacgatgaaggaaaggctgtcaccacactggctgcgctccgagtcgttaacactgaatttgccggtgaaattgcgcaatccctgtccggtgacctgagtgcaccgctgtcgcttccgccttcagcattgattgcgggggtgtacggcaagacagacggtgaacgtggggtgtggaaagcgccggcgaatgtggtgctcaacggcgtcagcgatgtcagcgtccgggtcaccaatgagcaacaggcggagctgaacccgaaaggcatcaatgtcattcgtcatttcagcgatcgcgggctcgtcgtgtggggtagccgcacacagaaagatgatgatgactggcggtatatcccggtgcgccgcctgttcgatgcggcagagcgcgacatcaaaaaggccctgcagccgatggtgtttgaacccaacagccagctgacctggaaacgggtgcagacggcgattgataactacctttaccgcctgtggcaacaaggtgccctggccggcaataaggcggaagaggcgtattttgtgcgcgtcggtaaaggtatcaccatgacacaagacgagattaaccaggggaaaatgatcattcaggttgggatggccgccgtgcgcccggccgaattcatcatccttaagtttactcaggacatgtctcagtaaagggggcccccctttccgactctttataaggatactgtgatgactatggttcttcctggggtttcgtacaatgaaacactgttaacgcaggcgtcaaacgacgatccggtgacgatgcccctgtttattggttatacccctcctgatacggcgataccggtaacggtgatgcagcccgtcagcgtgggatcactgacgcaggcgaacagtctctttggacagcgtgggacgctggcgtattccctgcgccatttctttgaaaacggtgggctgcagtgctatgtgctgcccctcgggccagggaagggagaacccgccgcgcgtctgcaagagttgattgccgcattacagacaccgcagatgctggagacgctgttagcggatgataagaccggcctggtcctggtaccggagctgagtgagctcaatgaggtgagttcgacctcgctttccgccgagggggttgacgcggccgaggttgacgccgatgccctttggtatcagggctggcaagtattactgacgctgtgtcgtcaggccccgcagcgttttgcgctgctggaattaccggaggatccggcgtccgcagtgacgctgacccaacagtctttttcagcagaccagtgtcagcgcggggcggcctggtggccacgcctggaaaccagttaccaggacgagtcgtcggcgcccgtggtgttgtcacccctgccggccgtcgcggcggccattcagcgcagtgcccacgataacggggtctggaaggcgccggccaacatcgcgttggccaaaacccgccgcccaacccaaagtatcctgacgtctcaggcattactggataaccagggggtgtcctgcaacctgatccgcagttttgtcgggaaaggcgtgcgtctgtggggatgccggaccttgcttaatgaggagaacacggcctggcgttatatccagatccgtttactggtcagcagcgtggagcactacctgagcaaattggcgcgcgcttacctgtttgagccgaatacggccccgacctggatgaaattaaagggccaggtctggacgtggttgcgtcagcaatggctggcaggggcctttttcggcacggtggaggatgaggccttttcgctcagtatcgggctggatgaaaccatgacggaagacgatattcgccatggaaagatgatcctgcaggtacgtctggcgctgctggcccccgcggaatttattgctatcagcctgacgctggatctgcgcgacggcacggccagcgcgcaaaccggaggtcaatcatgatgagtacacccgcggtatcccatcgttttctcgtcaattttttatttaacaacatacccaatccgtttgatatcgcgttccagcgcatatccggcctgtcgcggacactggaagtgagccagcaccgggaggggggcgagaatgtccgcaacctctggctggccgagcaggtgaatcacggcagcctggtgctggagcggggggtgatgaacgcctcccccctgacgctgcagtttgaccgcgtcttgcgccgggaaagcacgcagtgggccaacgtggtgatcatgttgctgaacgagctttcattaccggtgaccacctggacgctgagccatgccctgccggtgcgctggcagatgggcgatttggatgccggcagtaaccaggtgctcatcaacacgcttgagcttcgctatcaggatatgcgcatgctgggggtaaaactatgaccgtcgaaattcgtgagttgatcgtccaggttgaggtcaccgagcctgccccttctgccccgtccttaccgtttgcgcagcaccgtgagtgggacgatcagcggtgggtggagaggattaaacaagaggtgctggaacagctgcttgaaagggggtgtctgtgagcttacttgaacggggtttatcgaagctgaccctcaacgcctggaaagatcgcgaagggaaaatccctgcgggcagcatgagcgcgatgtataacccagagactattcagctggattatcagacgcggtttgataccgaagacaccatcaacacggcgtcgcaaagcaaccgctatgtgatttccgagccagtcggcctcaacctcaccttgttgttcgacagccagatgcccgggaataccaccccgatagagacgcagttggcgatgctgaaatccctctgcgccgtggatgcggccaccggatcgccttattttctgcgcatcacctgggggaaaatgcgctgggagaataaaggatggtttgccggccgggcccgtgatttatcggtcacctacacgctgtttgaccgtgacgccacgccgctgcgggccaccgtgcagttaagtctggtggcggatgagagctttgtgattcagcaatcccttaagacacaaagcgcccccgaccgtgcactggtcagcgtaccggatctggcctcgttgccgctgctggcgctcagcgccggcggggtgctggccagcagcgtagattacctgtcgctggcctgggataacgatttggataatctggatgattttcaaaccggggattttctgcgggcgacgaaaggggaggaggtatgagccacatcaccctggacatagcgggacagcgcagcacattggggatccgtcgtttgcgggtacagcagcttattaatgagatcccgctggcgcagctggagctgcatattcccacggataatcatggcgcagcggataacgcggtacaacacgaagtcagtcgtttcaccctgggcgtccgcgtggggattgcacaggataacaagccgcttttcgacggttatctggtgcaaaagaagatgcaactgaaggggaaagaatggtccgtgcggctggaggcccgccacgcgttgcagaaactgacgttcttgccccatagccgggtatttcgtcagcaggatgacagcaccgtcatgaaggggttgctgcagtctgcgggggtgaaactgacgcaagaatcggcggcgcaactgagcagcaagcacgatcaactgctccagtttcgtctcagtgactggcagtttattcgcagccggctcctgtccaccaattgctggctgctgcctgatgccgccagcgacacggtagtgatccgcccgctgtccgacgcggcaatggcctcacggacgcttgctcgcgacagtcacgactatacgctgtatgaaatcaatttgaattttgataaccgctttaccccagacagcctgtcactgcagggatgggatattgccgcacagcggctcacggcggcgcaaaaaagcccggccggcgcgtttcgtccctggaaacctgcaggtaaggttggccagtcctccgccgggcggcaagactacgccctggcgttcagcatgctgcctgaagctacgctgcaaaccctgtcgaactcctggctgaactatcaacaaatgaccggcgtacagggccacattgtgctggcggggacccgggacttcgcgccgggcgagagtatcaccctgagtgggtttggggcggggctggacggcacggcgatgctgagcggggtcaatcagcagtttgatacgcagtatggctggcgcagtgagctggtgattgggctgccggcgtcaatgctggagcccgcgccaccggtgaggtcgctgcatattggcacggtagcgggttttaccgccgatccccagcatctggatcggattgccattcatctgccagccctgaatctgcccgattcgctgatttttgcccgcctgagtaagccgtgggccagtcacgcgagtggcttctgtttttaccctgaacccggtgatgaagtggttgtggggtttatcgacagcgatccgcgttacccgatgatcctgggggcgttgcacaacccgaaaaataccgcgccgttcccaccggatgaaaagaacaatcgtaaggggttgatcgtgagtcaagccgaccagacgcaagccttgatgatcgataccgaagagaaaacgctgaggctgatggcgggggacaataccctcactttaaccggcgaggggaaccttactatgagtacaccgaacgccctgcaattgcaggccgatacgttgggtctgcaggctgacagtaacctgtcgattgcgggtaagcagcaggtggagatcaccagcgcgaaaattaacatgaaaaaataacctattacggtgaggttgctatgagtaacgacattttgaaagcgaccctggggcaatgctgggcatttccaccgcggttttcccccgacacgggcgtgtccctgacggcgggcgttgaggcagtgatgcagagtctgcgcgtgctgtttatgactgaaccgggcgaacgcattatgcgtgagagctatggcgggggtatgcatgactttatctttgagaatatcaccgatgaactgctggccaacatccacaaccgcatcgaagaaagcattctgcgccatgagcctcgggcgctgctcaaggacgtcattatccagccggacaaacaggaagcgagtcgtcttcgggcgcagatcaccgtgtatctggcaggctcggatctggtcgagacggtggacggtacgctgaacattcatgacggccagacgctgaggttactatgagcaacctggtggtcatcgacggtgacgcgctgacattcaacccgcagtttggcgctattacgatcacgccaccgccccagccacgaattagcggcagcggtgaggccagcatcggggggaaaaagatctgcattgttggggatgaaaagcaggtctcctttaccgttgactatatcaagcctccctttgtcgcttccccgggaaaagggacgctcaccatcaaagcgttggcgtccgagcagcgggctgagtttgcgacggcaccggcgccgatgattgtggtcggcagccagtttacgacgcaatttcagcccacaacaccggcccaggatccacaaggaaaaccggatacggatctgagtgctgtcaccggggttgggacatttatcaacagccagtcgtttgtcaccgccgggtgagtcatcgtgctgccgatagggcggaaacgggctcctgcgtgtcttctttatcatcacataaccaatggacaacattatgtctgacctggagcaactgaaacagatattgggcaacggattaacagaccagaccttcctgctggagccacggacagggaaggggctgctcaatctgatggcaaaatataccgaagccgtgccgtttgccggccataccgacgctgactggaaagacttctggatggccggctgcacgctggaagcgctgagtgacatctatcagtaccccgggctggcagagaaaaagctgccggtgcagcaggcgttcctgctggcgttgctgcatctgctcgaaacgcccagagccatgctgaacacggtgccggcgcggcaccgttcactttactaccgggatttattggggtttgccccccgcgccccgcagccggacagcgtggcggtgagctttacgctgcaaagaaattcgtccccgtatgcgttacccgccggcagcctgctggatggcggccaggacagcgccgggaacagcatcacctatcagactgacgacagtctgctgatcaccggccagcaactggaacagttgtgctggacagcccaggttggggagacgtggaaacggtataccgccatcgacagcgcgacgggcgttacgctaccggctgaggggctgcgtctttttaccgcaacaggacaggggaccgacaccaaagagaaggcccccgagctttatctggggttcagcgggacgtctgcgcaggacaccctgtcgctttactggtctgtgcgcgcctcatcggcgctggatgtcacctggtggtattaccaggggaccaaatgggcctcgctggatgccgagctgcaggacaatacagcgtccttgtccgtcagcaacctgtggcgggcgcggctgccggcagacagtcagccggggagcggtctgccacaggacgacgagccgctggaggccgggtattactggatcaaaggcacgctgaaagaaaataaagaggcaaaggacgagaactcgcccgccgaggccatgccgcaactgcaggccgtgctggccaatgcgatgaccgcgaccctgaatgtggcgcaggcgattgatgacagccacttttcccagccgctgccagccaacacgatcaaccagcttgtgacgccagttgccgccatcagcgacgttcgccagcccctgccctcggtaggcgggcagccacgggaaacggagatggcgatgttgcagcgtgccgcgccccggatagcccaccggcagcgggctatcacctggaacaatatgcgcagcctcctgatggagcactacccagagatttttgatgtccgttttcccgatgtggacaaactgagtcgtctcccggcgcttgaggtgcaatcgctgatggttatccctgacggtcgttatggtgataacgatgacgcgctgcgcccggcattgagtaacggaaggttgagccggatggcgcaatggctgtcgcagtacacttcgctgtgggcggcgccgacgctcaagaacccgaaatatatcgatgtgacggctcgctatcgggtgacgttcgtggtggggattcgccctgattatggttatcgtcagctcgcggcgcagttacaacacgactatatgccctgggcgaccgatcgacgccaggcggtaacaccgggcaatcaggtggactactaccagctgctggccacgctgcaacagtcaccgctggtgcagtccgtgaacgcgctggttcttagtcacgacgttattgatgaaacgggaaaacccacatcgatggaaacacaaagtaccgtcaccgccagggatgatgaggtcctgattttgtgcccggaaggagagacccatgtctaaagaaaacgccctgttcccggcggtgaaagacgcgattgtgtttgatgcgctctggcaacaggctcacgagaaagtcactgcgctcagtggtgagatctggacggataccggcgatcacgatccgggcgtcactctgttacagtccgcgacttggaactgttccgacctcagttaccgcgcgtcactgtcgctgaatgacctgctgacccatcaagaccagagcaccttgttcccggaagagttcggtcctgaacaggtgcttacctgtaacacggtgacggcagaggattaccgccgggccttactggacgtgcacagcagcgacattcaggccctggacacccctgagcaggattttttattcagcgatgtcagcctgactcaagaacctaaagagcaccgttttcactggtggtataacgcggaaaaacgcgaatacagcttcaggaagccgacagacagcggtgaagtgaacgaattgaaactgcgggggaatctgtggctttcgctggtcccgacccgctatacccagtccctgtcgcccgagaacctggcggcagtggagcaatgcctggctgagtttcttgcggcgcaccgtaatcttggcgaagtggtgtctcgtattacctggctgcaaccggcgacctttagcccgcggatgacgattgaactggccgataacatcggcgatatcaatcaggtggcggcgcagatttatcaggtcactgacgcgtttttgcgcccggcggtcgcccgttataccaccgaacaacggcgtgcgctcggtgatgccgatgacgccatctttgaggggccgaggctgaaacacggctggcagcaaacggcaccctcgcagatcacctccgggggttacgtcctcaacctcggcccgctggtgaacctgttgctggctatccccggcgtggccagcctgagcaccttgtctgtcgataaaggcgatggccacattacggccgttaccggggacaacttgcgctggcaagtggctgacggctattaccctctgctgtggggggcgccgccgctgagcctgctagcgggtgacgatagtccgttaaccctggtgtcgaaaggcggtattcgcaacacgctggagagtgaggcgatggcgggttacctgacacaggcagacctgatcgtcacaacgcccacggtgttacccgccggccgctttcgtgatcagacgctttatattcccatcgggcagcgtcagcccgaatgctatgccctgcagcagcccgataccgtgattgacgaccagacgcgcgcggtgcatcagtttctgctgcctgtcgaccaattgctggccgacggtacggcagagctggcacagctgcctaccttactggcatttaaaaaccgaggcgacgccattcgggggacccgctggccctatacgaatgcgatggtgcagcaggctattcatcagccctacgcgaaaacgctggaagcaattgcgcagcaggatgcggctatcttcacgcaggataagcagcctgttgggggcaattatgcccgcgaactggattttcttcagtatctgctggggtattttggcacccagcgggccgccctgccgctaacgctggatttgcctgattttctggcgacgcagcgggcgtatctggcgcagcaacccgccttaggttacgaccgcatcaatatccgtattgaccaggtttccgccctgcaaaagcgtattgcggcgcgcatcggccttgacagcatctgctttgctgataatccggacctgggtcaactgccattttacctgattgagcatcgtcagctgctgccccagaccccggacagcacctttgacagtgaacagaccccgtccggttttgcggtggccgaacccgacattacgctgacgcaggcgggcagtgtcggcaaggtggtccaggggcagcttatcgaccttattgcgattgaagggggcagtcgactgcatgtcagccggctgctggttattaaggccgagggggacagttttaccgtcagcacggaaaacagtcagcaactgcacaacaccctgtcacggcttgagacggcctgggcgagtcacaacctgcgctggcaaaacagcaatgtctggctgcaggatatggattaccggctgaattatgctgaggcaaaactgcaaccggctaatccacagcagcgcttactggcgagtaacgcgcaatccccgtatcccgccatggtcagcgtcggtgatggcattgtcctgcgccccgcgggcctacagttttacatgccgggggcaaacgccacccgtgctgccactcttgatgctgactggcagcttgcggcgaccgttaaagcggtcgatccgattgcgggcacgttgcttatcgaaaaagcggccggcagcacagaggattttccctcagcggagagcagcttccgctaccagtgggcgtttagccaggcgaactatgcgacgacagacaggttctcttttgtggtcagcgcggtgctcaatcgccgtctgatagagaaccccaatatcgtgcctgagcagctggttgcctggatacaggaaaccattatggcggagttcccggcccacgtgtccctgattaatcactggcttgatgacgccacctttaacaactttggggtgacctattcgcgctggcaaaacagtggcatgccgctgggcgatgatgcttttgcgctgatgcaaatactgaccctggggcatctccctgttacccaactggacatcggcctgatgcgcatcgccaccgaggagcagcgcaccgaggttatcggtgacggcagccagtggcatgaagacgttattctgcgagaagagctgttctacgtgccgaaagacgtacaaaccaccctttaacatcatgacgaatctggagagcaaaatgacggacaaaacccctaagaaaacggcagaaaccccagtgaatacccaggcgaccttagccgacacaacggacacagcgcgtgacagcgagccaaagagcagagccttgccccaggccgatgcgctgaaggcgcgctttaaggcgggcagtattccgctgcagacggactttgcggacctgattgatctggccaatatgggacgtcaggcggtgggcggagcagaggggcaaaccgggccggcaaatgggtttaccctttcatcggagggccttcttgaattaaaacccaatgcaactaaagggattgtggttgataaagacggcattgccgtcaaggcagaggcaagtaaggggcttcaggtcaccagcaacggtgtaggcgtacaagccgggaatggcgttgcggttaatggtagtggcgtgaacgtaaaactggcgaacgggactgctagcgtcactacgggtaatgccggcggattgacgttagctgcggcgggcttatccgtacaggccgggagtggtattagtgttgccaacaccggcgttgccgtacaggccgggaatggtattagtgttaccagcactggcgttgccgtcaaggcggaggcaagtaaggggcttcaggtcaccagcaacggtgtaggcgtacaggccgggaatggcgttgcggttaatggtagtggcgtgaacgtaaaactggcgaacgggactgctagcgtcactacgggtaatgccggcggattgaatttagctgcggcgggcttatccgtacaggccgggagtggtattagtgttaccagcactggcgttgccgtcaaggcggaggcaagtaaggggcttcaggtcaccagcaacggtgtaggcgtacaggccgggaatggcgttgcggttaatggtagtggcgtgaacgtaaaactggcgaacgggactgctagcgtcactacgggtaatgccggcggattgaatttagctgcggcgggcttatccgtacaggccgggagtggtattagtgttaccagcactggcgttgccgtcaaggcggaggcaagtaaggggcttcaggtcaccagcaacggtgtaggcgtacaggccgggaatggcgttgcggttaatggtagtggcgtgaacgtaaaactggcgaacgggactgctagcgtcactacgggtaatgccggcggattgaatttagctgcggcgggcttatccgtacaggccgggagtggtattagtgttaccagcactggcgttgccgtcaaggcggaggcaagtaaggggcttcaggtcaccagcaacggtgtaggcgtacaggccgggaatggcgttgcggttaatggtagtggcgtgaacgtaaaactggcgaacgggactgctagcgtcactacgggtaatgccggcggattgacgttagctgcggcgggcttatccgtacaggccgggagtggtattagtgttgccaacaccggcgttgccgtacaggccgggaatggtattagtgttaccagcactggcgttgccgtcaaggccgggaatggtattcaggtcaatacgaacggtgtggggctaaagagcaccgcctggataaacgtgatgtgtggacttcataatgccactttctatgtgtacagcagttacttttgcgcattcttttgtaattattctaatggctgcgttgcatatgtatacggtcgaggagctttttatctgtccacagttagtggtgatatcaaattgaattcagtctctcccaatcaaatattagcaatgacgggaggttcatcatcagcggtaaccatgatgtcttggacatcaacgaaagctgctgagggtatttcattagaataccaaaggaagagcttaataaattctagcagtattagtggcagcgcatcattggtttccgcaccataatgactagaaattttttatatactcccagtattactatacaaaagtgtcgtgttaatgtggtttctctgtcgccagagaaacaccggctacatgcttatttatttaccagggagaatatcagtaaattattatccctggctataaataagcatcggacagaggagagcatccatattaccaaactggtgcttaatttaggcgttattccggaaggacacttttcgacgctgtttaaccaacgatttgcgcaggcgttagagcaatgtatggaacagttagccactcaggctcatacacaaaacacacggcttgctcatgctacaccagccgagttgctggcgcacgttgaaagtaatcctgaggcgctcaccccattggctatttgctgcctgcaacagacctcgttgctgcaattgttacaaaacgggcaaccccagtatttgcggggtttattaaaacgactgctacaaagggaagataagcactcgtcagcgttagtggatacttgttatagccgggtgaccgccagccgtttagggatagcggcgctgtgctacctgcagcatcaggcgcaaggacatgactggctgagtcagcatacccccccagccagtcaagtgattagctgggcaaaggcgattgctcagggtgaaattccacctgaacagcttgcgcggttaatgaccggcaattggccttccgatagcgcattgcccgagcaacgagcctattcccccttggtcgtgatgcgttggttgttgccactatggcgacaacccgccgtgcgccaggtgattcatcgactgaaaggagggcggggggtgcaattggttgatgcttatctgagtcgttgtttacaactgcaggatgatgacgccatgcgggaggaagaagggatgcatccagacctccagcaggttgagctaccgctcgataacaccgtgttgctggagggcgaggaggagcataccgtgcgggatcatgccacgttgccgcagggcaaggagaggccgtccgatcccaaacgggttgcactactgcgggataacgccacattgccggggagtgaggagatgccgacaacatctcggtgcacgatgcaaccgagggaaggcggtctccgctcgccgaatgaacagctctcgccgagtcaggatatcagcaatgccggtttgctccttctgtggccgcttttgcctcagctgttttccctgctgggtctgcgggaggaagagcggtttgtcagcgatgcggcgcggtggcaggccgtgtacggtctcgatcgattggtctggggggaggttaacccgacggaggaccggttgatgttgaatctggtgttatgtggggtgtccggctcaacctccgtaacgccgccgacaccgctgagtctgctgcaactgcaacagattgacgcctggctggccgctatcggccaacaacttcccggttggcaaaaattgagcctgatggatattcggcagttgttcttgcagcgggcaggtgaaatcagcatggaaggagcattcccccaaattagtgtgcggccggaaccctatgatttcttactcagagattggccgtggccaatgacgctggcgtctttcccctggactgaacagccactgactatcgtctggccgctaaccgatttcacaggataaaacagccgctattttctcttcttatcggatatcaacatgacgctttcttcaacctttcagcccgcgtttattccgcagggtgattgccagctatcgctattattcagcgagctggaacgcatcgatctgctattacagcattattattaccgccattcagcacgtcacgaggattttaacgcgtttctgcttagcgaagaggaggttgaggcgcgaatgaaacaccctgtcggcaggcctcattgggccgctgccacgccgccgatttaccggacggaaaacgggcagccattgttaaccgaaggcttaacggacctgattaatcgtttcgaactcactgattttgaaagagacacggtgttattgggattgctgccccattttgacagtcgctattatgagctgttttcctggatccaggggggaaagcaaagtcaactgcccagtttttcattggccttaacgctattttgtccttcagatagggagagacgggcacagcaagccagttttttgcatcgggcaccgttaatgagctgtcagctattaacgattgaggagaataaaaaaaatccggcatggagccacacccgctttatgaccgacagcagtgtgtaccattttttactcgggcatcattatctggcgccggcgttagcgtcatgggctgaatggccaatccccccggcgttgcctttttatcctgccggcttaaaacacgcgctggcaggcgtgttactgactgacgatatcgagccgcgccccgtggtgttgctgcgcggcatgccgggtagcgccagagcccatgcggtgtcgagcatttttgcctctgaaaaccggcagacgctgcaggttgatatcgataagtgcaccgagagtgatgacgatgcgctgctactgcatttaacctgtctgatgcgcgaagcccgtatgcgcggcgcgggaatggtgatccgcaacctgcaggcacggatggaaaagagcacgtcactgccggagaggttatctgagcacctgaaccagccgggattaagggtggtgtgcctggtcgaaccctatgccccgcctttatggctgaaaaaaacgcccaccttgcagacagagatgccggtgttgacgcaggaggaaaaaacgcacctgctcatgggttgtctgcctgaacgacgcgcggcggatattgatcttatcagtttaagccagcgctacacctttaccccggaaagtctgccgctgattgtgcaagaggccgaactgtatcggcagcaacgtgacccggcggatgttctgcaacagtgtgatattcgtcaggcgctcaatttacgcacccaacagaactttggcgcgttagcgcaacgtattacgccgaagcggacgttaaacgacctgttggtgtcagagagtctcttgcagcaactccaggagatgttgacggccatccgctatcgggaaaaagtcctggccggcggttttaaagataaggtgggctacggcgtcgggatcagcgcgctgttctacggcgactcgggaaccgggaaaaccatggcggcggaagtgctcgcccataccctgggggtggatttaatcaaggtagatctctccacggtgatcaataaatacattggtgaaaccgagaaaaacctctcccgtatctttgatttggcagagcaggatgccggtatcttgttctttgatgaggccgatgccttatttggtaagcgcagtgaaaccaaagatgctcatgaccgtcatgccaatattgaagtgtcttacctgttacaacggctggagaattttcctgggttggttattttatccaccaataaccgcagtcacctcgacagtgcgtttaatcggcgatttacctttattacccgctttacttatccggatgaaacgttgcggcataaaatgtggcaaaaaatatggccgaagcacattaaggtttcaccggacgttgattttgaaaaattagcgcagcgagcaaatatcaccggcgcaaatatcaggaacattgccctgttagccaccttctttgctgaagaaagtggcaatcaagaagtcagtcacagccatatcgacgcggcgttaacccgtgagttggctaaaacagggcggcttgcgctgtaacctgctgcctaaacagccagaacacacaacaccatcatggacagtgatgacttactattaatgcagaggaatgagtatgtctaattatcaaacgctggtcgacgtgaataacgcgatgaataagatgttgcgcgcttatgtgaatgaggccgtggcaatccgctttgatttaccggatgtggatgccacgcaggcagatgccgcgataagcgtgtttctttatgatatccacgaagacctgcagctgcgtactgcagagtcccgcgggtttaatgccggcgcaggacggttattacccggttgggtcaacgtgaagtgcaactaccttattacgtattgggaatcaaccggccccgccacggatgccgacaacccggacagccagcccgacaaccaggctatccaggtgatgtcccaggtcctggcggcgttgattaacaaccgccagttagccgatatccccggggcttacacgcaggttatgccgcccaaagaaaacctgaatagcctgggtaacttctggcagtcgctgggcaatcgcccacgtctttcgctcaactattgtgtcactgtgccgattagcctgagtgataaaggcgaggaaatgaccccggtgaaatccttgtctaccaccgttgagccaaaagcgcccctttctccactggtcattacagatgcactgcgggagcaattgagggtggcgctagggggcgattatgatgcctgtcttgctatgacgcacgttaatctggactcctcaccggttgccaattcagacgggagtgcggctgaaatcagggtgtcgttgcgggtttacggtatgacgccgacagaatatcttgccccgatgaacactgtttttaatgaatgggaaaagagtgaagctgcggcggtcacgcccgatggctaccgtgtttatatcaacgcggttgataaaacagacctgactggtatttaaataaattctgatgtgaaaatttaaaagcataccgcacgctaattaatattaatcagtggtgagtttgcatttacaccccgtcatttatttaaaagaggtatatttatgccgactaaaacaccacagttacagctggcgatcgaagaatttaataaagcaatattacgggctgcagaatatgaatggaatattgaaaataatatttacgataaagttcacacacttttcccagcagcagataaatctctaaaagagagtgtggtcgcgcagagcgttgaaaaaatatctgaggaaaaccaggcgtttgagtttaaccacttgggtaacgatctccttgaatttccggcagtagaatatattgctcgttcttttttacgcagaatactggaaaaactggctatttatcaagctagagatccatcatttactataacgaaaaccaatcaggatgccgggataggtttcttggaagggtgggaaagcgataacgcgaaatgggcaaagcaaatgaacgcgctgctgaatgaaagcaaggttaacgcccgcgttttgaccagcctggcatacagctatatccgcttttttcgcccgctgaagacattgcgcaagctgggaggggaggctaatgagtctttgctgaacagcaaagaagccaacccgcgtctggatatttttgccagctcaacggcgggagcgccgccggtcatgtcgaagccgatcaccactcagcctcacggctgggtgtggctaaaatacgccgactggaacgccgcggaagcgttgggtatcaaaacgtccacggatttaattggcagccggccaagcagcgaccagcataaaggtacaggcttcaagtttaagggcatgctgcaggcgataaagccgccgctgtatcgacgccattcattttcccttagggaacgcgacgaacatgaatcggggtacggcggtttcgttatcaacgataagtcgatgacctcaataggggcagaaaaaccgttggtggtgaattggcgtcagcagaacatggataaaaagctgccgatgttttccggcccgtccagcaccacttcctatatgtatgaaattgcccgtttgctgaatctgcctgctgctgaaacacaggtatctacgttttcgataattcggctctgtcaagtatttaggtcagagtgtaactaaggatcctctagagtcgacctgcaggcatgcaagcttggctgttttggcggatgagagaagattttcagcctgatacagattaaatcagaacgcagaagcggtctgataaaacagaatttgcctggcggcagtagcgcggtggtcccacctgaccccatgccgaactcagaagtgaaacgccgtagcgccgatggtagtgtggggtctccccatgcgagagtagggaactgccaggcatcaaataaaacgaaaggctcagtcgaaagactgggcctttcgttttatctgttgtttgtcggtgaacgctctcctgagtaggacaaatccgccgggagcggatttgaacgttgcgaagcaacggcccggagggtggcgggcaggacgcccgccataaactgccaggcatcaaattaagcagaaggccatcctgacggatggcctttttgcgtttctacaaactcttttgtttatttttctaaatacattcaaatatgtatccgctcatgagacaataaccctgataaatgcttcaataatattgaaaaaggaagagtatgagtattcaacatttccgtgtcgcccttattcccttttttgcggcattttgccttcctgtttttgctcacccagaaacgctggtgaaagtaaaagatgctgaagatcagttggggcaaactattaactggcgaactacttactctagcttcccggcaacaattaatagactggatggaggcggataaagttgcaggaccacttctgcgctcggcccttccggctggctggtttattgctgataaatctggagccggtgagcgtgggtctcgcggtatcattgcagcactggggccagatggtaagccctcccgtatcgtagttatctacacgacggggagtcaggcaactatggatgaacgaaatagacagatcgctgagataggtgcctcactgattaagcattggtaactgtcagaccaagtttactcatatatactttagattgatttacgcgccctgtagcggcgcattaagcgcggcgggtgtggtggttacgcgcagcgtgaccgctacacttgccagcgccctagcgcccgctcctttcgctttcttcccttcctttctcgccacgttcgccggctttccccgtcaagctctaaatcgggggctccctttagggttccgatttagtgctttacggcacctcgaccccaaaaaacttgatttgggtgatggttcacgtagtgggccatcgccctgatagacggtttttcgccctttgacgttggagtccacgttctttaatagtggactcttgttccaaacttgaacaacactcaaccctatctcgggctattcttttgatttataagggattttgccgatttcggcctattggttaaaaaatgagctgatttaacaaaaatttaacgcgaattttaacaaaatattaacgtttacaatttaaaaggatctaggtgaagatcctttttgataatctcatgaccaaaatcccttaacgtgagttttcgttccactgagcgtcagaccccgtagaaaagatcaaaggatcttcttgagatcctttttttctgcgcgtaatctgctgcttgcaaacaaaaaaaccaccgctaccagcggtggtttgtttgccggatcaagagctaccaactctttttccgaaggtaactggcttcagcagagcgcagataccaaatactgtccttctagtgtagccgtagttaggccaccacttcaagaactctgtagcaccgcctacatacctcgctctgctaatcctgttaccagtcaggcatttgagaagcacacggtcacactgcttccggtagtcaataaaccggtaaaccagcaatagacataagcggctatttaacgaccctgccctgaaccgacgaccgggtcgaatttgctttcgaatttctgccattcatccgcttattatcacttattcaggcgtagcaccaggcgtttaagggcaccaataactgccttaaaaaaattacgccccgccctgccactcatcgcagtactgttgtaattcattaagcattctgccgacatggaagccatcacagacggcatgatgaacctgaatcgccagcggcatcagcaccttgtcgccttgcgtataatatttgcccatggtgaaaacgggggcgaagaagttgtccatattggccacgtttaaatcaaaactggtgaaactcacccagggattggctgagacgaaaaacatattctcaataaaccctttagggaaataggccaggttttcaccgtaacacgccacatcttgcgaatatatgtgtagaaactgccggaaatcgtcgtggtattcactccagagcgatgaaaacgtttcagtttgctcatggaaaacggtgtaacaagggtgaacactatcccatatcaccagctcaccgtctttcattgccatacggaattccggatgagcattcatcaggcgggcaagaatgtgaataaaggccggataaaacttgtgcttatttttctttacggtctttaaaaaggccgtaatatccagctgaacggtctggttataggtacattgagcaactgactgaaatgcctcaaaatgttctttacgatgccattgggatatatcaacggtggtatatccagtgatttttttctccattttagcttccttagctcctgaaaatctcgataactcaaaaaatacgcccggtagtgatcttatttcattatggtgaaagttggaacctcttacgtgccgatcaacgtctcattttcgccaaaagttggcccagggcttcccggtatcaacagggacaccaggatttatttattctgcgaagtgatcttccgtcacaggtatttattcggcgcaaagtgcgtcgggtgatgctgccaacttactgatttagtgtatgatggtgtttttgaggtgctccagtggcttctgtttctatcagctgtccctcctgttcagctactgacggggtggtgcgtaacggcaaaagcaccgccggacatcagcgctagcggagtgtatactggcttactatgttggcactgatgagggtgtcagtgaagtgcttcatgtggcaggagaaaaaaggctgcaccggtgcgtcagcagaatatgtgatacaggatatattccgcttcctcgctcactgactcgctacgctcggtcgttcgactgcggcgagcggaaatggcttacgaacggggcggagatttcctggaagatgccaggaagatacttaacagggaagtgagagggccgcggcaaagccgtttttccataggctccgcccccctgacaagcatcacgaaatctgacgctcaaatcagtggtggcgaaacccgacaggactataaagataccaggcgtttccccctggcggctccctcgtgcgctctcctgttcctgcctttcggtttaccggtgtcattccgctgttatggccgcgtttgtctcattccacgcctgacactcagttccgggtaggcagttcgctccaagctggactgtatgcacgaaccccccgttcagtccgaccgctgcgccttatccggtaactatcgtcttgagtccaacccggaaagacatgcaaaagcaccactggcagcagccactggtaattgatttagaggagttagtcttgaagtcatgcgccggttaaggctaaactgaaaggacaagttttggtgactgcgctcctccaagccagttacctcggttcaaagagttggtagctcagagaaccttcgaaaaaccgccctgcaaggcggttttttcgttttcagagcaagagattacgcgcagaccaaaacgatctcaagaagatcatcttattaatcagataaaatatttgctcatgagcccgaagtggcgagcccgatcttccccatcggtgatgtcggcgatataggcgccagcaaccgcacctgtggcgccggtgatgccggccacgatgcgtccggcgtagaggatctgctcatgtttgacagcttatc

SEQ ID NO: 40 - protein, 149 aa, Serratia entomophila; identical to SEQ ID NO: 2

SEQ ID NO: 41 - protein, 354 aa, Serratia entomophila; identical to SEQ ID NO: 3

SEQ ID NO: 42 - protein, 451 aa, Serratia entomophila; identical to SEQ ID NO: 4

SEQ ID NO: 43 - protein, 417 aa, Serratia entomophila; identical to SEQ ID NO: 5

SEQ ID NO: 44 - protein, 149 aa, Serratia entomophila; identical to SEQ ID NO: 6

SEQ ID NO: 45 - protein, 54 aa, Serratia entomophila; identical to SEQ ID NO: 7

SEQ ID NO: 46 - protein, 228 aa, Serratia entomophila; identical to SEQ ID NO: 8

SEQ ID NO: 47 - protein, 528 aa, Serratia entomophila; identical to SEQ ID NO: 9

SEQ ID NO: 48 - protein, 140 aa, Serratia entomophila; identical to SEQ ID NO: 10

SEQ ID NO: 49 - protein, 139 aa, Serratia entomophila; identical to SEQ ID NO: 11

SEQ ID NO: 50 - protein, 607 aa, Serratia entomophila; identical to SEQ ID NO: 12

SEQ ID NO: 51 - protein, 961 aa, Serratia entomophila; identical to SEQ ID NO: 13

SEQ ID NO: 52 - protein, 636 aa, Serratia entomophila; identical to SEQ ID NO: 14

SEQ ID NO: 53 - protein, 535 aa, Serratia entomophila; identical to SEQ ID NO: 15

SEQ ID NO: 54 - protein, 696 aa, Serratia entomophila; identical to SEQ ID NO: 16

SEQ ID NO: 55 - protein, 293 aa, Serratia entomophila; identical to SEQ ID NO: 36

SEQ ID NO: 56 - protein, 358 aa, Serratia entomophila; identical to SEQ ID NO: 18

SEQ ID NO: 57 - DNA, 24762 bp, Serratia entomophila
  primer_bind 8382..8424: note = primer SEAfp8-9_merge_F2_RV
  primer_bind 8406..8435: note = primer SEAfp8-9_merge_F1_FW
  primer_bind 20705..20755: note = primer SEAfp16_pBAD33OH_F1_RV
  primer_bind 20728..20761: note = primer pBAD33_SEAfp16OH_F2_FW
  source 1..24762: mol_type = other DNA
  CDS 1320..1769: note = Afp1
  CDS 1788..2852: note = Afp2
  CDS 2872..4227: note = Afp3
  CDS 4267..5517: note = Afp4 without STOP codon
  CDS 5520..5966: note = Afp5 without STOP codon
  CDS 5969..6130: note = Afp6 without START and STOP codon
  CDS 6133..6816: note = Afp7 without START and STOP codon
  CDS 6819..8405: note = Afp8 without START
  CDS 8426..8845: note = Afp9 without STOP codon
  CDS 8848..9267: note = Afp10 without START codon
  CDS 9344..11164: note = Afp11 without STOP codon
  CDS 11166..14051: note = Afp12 without START amino acids MS
  CDS 14077..15987: note = Afp13
  CDS 16044..17651: note = Afp14
  CDS 17688..19778: note = Afp15
  CDS 19855..20736: note = Afp16
atcgatgcataatgtgcctgtcaaatggacgaagcagggattctgcaaaccctatgctactccgtcaagccgtcaattgtctgattcgttaccaattatgacaacttgacggctacatcattcactttttcttcacaaccggcacggaactcgctcgggctggccccggtgcattttttaaatacccgcgagaaatagagttgatcgtcaaaaccaacattgcgaccgacggtggcgataggcatccgggtggtgctcaaaagcagcttcgcctggctgatacgttggtcctcgcgccagcttaagacgctaatccctaactgctggcggaaaagatgtgacagacgcgacggcgacaagcaaacatgctgtgcgacgctggcgatatcaaaattgctgtctgccaggtgatcgctgatgtactgacaagcctcgcgtacccgattatccatcggtggatggagcgactcgttaatcgcttccatgcgccgcagtaacaattgctcaagcagatttatcgccagcagctccgaatagcgcccttccccttgcccggcgttaatgatttgcccaaacaggtcgctgaaatgcggctggtgcgcttcatccgggcgaaagaaccccgtattggcaaatattgacggccagttaagccattcatgccagtaggcgcgcggacgaaagtaaacccactggtgataccattcgcgagcctccggatgacgaccgtagtgatgaatctctcctggcgggaacagcaaaatatcacccggtcggcaaacaaattctcgtccctgatttttcaccaccccctgaccgcgaatggtgagattgagaatataacctttcattcccagcggtcggtcgataaaaaaatcgagataaccgttggcctcaatcggcgttaaacccgccaccagatgggcattaaacgagtatcccggcagcaggggatcattttgcgcttcagccatacttttcatactcccgccattcagagaagaaaccaattgtccatattgcatcagacattgccgtcactgcgtcttttactggctcttctcgctaaccaaaccggtaaccccgcttattaaaagcattctgtaacaaagcgggaccaaagccatgacaaaaacgcgtaacaaaagtgtctataatcacggcagaaaagtccacattgattatttgcacggcgtcacactttgctatgccatagcatttttatccataagattagcggatcctacctgacgctttttatcgcaactctctactgtttctccatacccgtttttttgggctagcaggaggaattcaccatggctattaccgcagacgacattgcagtgcaatatccaatccctacttatcgctttattgtgaccctgggcgatgagcaggtgccgtttaccagtgcttctggtctggatattaattttgacaccattgaataccgggacgggaccggcaattggttcaaaatgcccggccagcgacaggcccctaacattacgctgagtaaaggagtatttccgggcaaaaatgcgatgtatgaatggattaacgccattcaacttaatcaggttgaaaagaaagacatcatgatcagcctgaccaatgaagccggcacggaagtgctggtcagctggaatgtgagcaacgccttcccgacctcactgacctccccgtcatttgatgcgaccagcaacgaaatcgcggtacagcaaatcacgctcatggccgatcgcgtgaccattcagactgcctaatcaagaggacatgttgccatgactgtgacaaccacttatcccggcgtttatctcagtgaagatgccgtatcgagcttctcggtcaacagtgccgccaccgccgtgcccctgtttgcgtacgacagtgaaaataccaacaccattaataaaccgattcaggttttccgcaactgggcggaatttaccgtcgagtacccaacgccgctggaagacgctttttataccagcctgagcctgtggtttatgcacggtggcggtaaatgttatctggttaacgaggccaatatcgccgacgcggtggcgcaatacgatgatattacgctgattgtcgcggcagggacagataccactacctataccgcgttcaccacagtagtgggccagggctaccgtatttttggcctgtttgacggtccgaaagagaaaattgccggcacggcgaagccggatgaggtcatggaagaatatccgacctccccgtttggcgcggtattttacccgtggggcaccctggcatcgggggcggcggtgccgccgagcgccatcgccgcggcctccattacccaaaccgaccgtacgcgcggtgtgtggaaagcgccggccaaccaggccgtgaatggcgttacccctgcgtttgctgtcagcgatgatttccagggtaagtataaccagggcaaggcgctgaacatgatccgcacattctcgggccagggaacggtggtgtggggtgcccgcacgctggaggacagtgataactggcgctatatcccggttcgccgcttgttcaacgcggttgagcgggatattcaaaaatccctgaataaactggtgtttgaacccaacagccagccgacctggcagcgtgtcaaggccgccgtagacagttatctacacagtctgtggcagcagggcgcgttggccggtaatacccccgctgatgcctggtttgttcaggtcggcaaagatctcaccatgacccaggaagagatcaatcaggggaagatgatcataaaaatcggcctggccgcagttcgcccggcagaattcatcatcctgcagttcagccaggatatcgcgcaataattcactgaaggaaaagaacatggctactgtcacatctgtaccgggtgtctatattgaagaagatgcctcgccagcgatgtcggtgagcgcgagtgcgaccgccgtgccgttatttgtcgctcgttttacccctctcaagccagaactggcgggcgtgatcacccgcatcggcagctggctggactataccatcctgtttgacagcaacgtgccttcttccgcacgcgttaccgtgtcgtcaacggcggttgaaccgtcccctgaattcgatgcgctggaaacagcgtcgtctaaagcgacaacgacatatacctaccagattgatgatactgaggtcgtggatccgacggcctccgtcgccctgcggctctatttccagaacggcggcggcccctgctacctctatccgctggaaaaggcagacgataacggcccattggccgcgttgccggacctcatcgacgaggtcggggagatcacactgctggcaagtccggatcccgatgagacttaccgtactgcggtgtatggcgcgctggctgcctcactagatcagcacaaagggtacttcctgctggccgacagcgtcaatggcgacgcgcccagtgcggtcggtggttccgcccaggtggcggtgtattacccgaatgtagaagtgccgcacacccgtaaactggatgacgcagaggttgccatcgacggttacctcgacgatgaaggaaaggctgtcaccacactggctgcgctccgagtcgttaacactgaatttgccggtgaaattgcgcaatccctgtccggtgacctgagtgcaccgctgtcgcttccgccttcagcattgattgcgggggtgtacggcaagacagacggtgaacgtggggtgtggaaagcgccggcgaatgtggtgctcaacggcgtcagcgatgtcagcgtccgggtcaccaatgagcaacaggcggagctgaacccgaaaggcatcaatgtcattcgtcatttcagcgatcgcgggctcgtcgtgtggggtagccgcacacagaaagatgatgatgactggcggtatatcccggtgcgccgcctgttcgatgcggcagagcgcgacatcaaaaaggccctgcagccgatggtgtttgaacccaacagccagctgacctggaaacgggtgcagacggcgattgataactacctttaccgcctgtggcaacaaggtgccctggccggcaataaggcggaagaggcgtattttgtgcgcgtcggtaaaggtatcaccatgacacaagacgagattaaccaggggaaaatgatcattcaggttgggatggccgccgtgcgcccggccgaattcatcatccttaagtttactcaggacatgtctcagtaaagggggcccccctttccgactctttataaggatactgtgatgactatggttcttcctggggtttcgtacaatgaaacactgttaacgcaggcgtcaaacgacgatccggtgacgatgcccctgtttattggttatacccctcctgatacggcgataccggtaacggtgatgcagcccgtcagcgtgggatcactgacgcaggcgaacagtctctttggacagcgtgggacgctggcgtattccctgcgccatttctttgaaaacggtgggctgcagtgctatgtgctgcccctcgggccagggaagggagaacccgccgcgcgtctgcaagagttgattgccgcattacagacaccgcagatgctggagacgctgttagcggatgataagaccggcctggtcctggtaccggagctgagtgagctcaatgaggtgagttcgacctcgctttccgccgagggggttgacgcggccgaggttgacgccgatgccctttggtatcagggctggcaagtattactgacgctgtgtcgtcaggccccgcagcgttttgcgctgctggaattaccggaggatccggcgtccgcagtgacgctgacccaacagtctttttcagcagaccagtgtcagcgcggggcggcctggtggccacgcctggaaaccagttaccaggacgagtcgtcggcgcccgtggtgttgtcacccctgccggccgtcgcggcggccattcagcgcagtgcccacgataacggggtctggaaggcgccggccaacatcgcgttggccaaaacccgccgcccaacccaaagtatcctgacgtctcaggcattactggataaccagggggtgtcctgcaacctgatccgcagttttgtcgggaaaggcgtgcgtctgtggggatgccggaccttgcttaatgaggagaacacggcctggcgttatatccagatccgtttactggtcagcagcgtggagcactacctgagcaaattggcgcgcgcttacctgtttgagccgaatacggccccgacctggatgaaattaaagggccaggtctggacgtggttgcgtcagcaatggctggcaggggcctttttcggcacggtggaggatgaggccttttcgctcagtatcgggctggatgaaaccatgacggaagacgatattcgccatggaaagatgatcctgcaggtacgtctggcgctgctggcccccgcggaatttattgctatcagcctgacgctggatctgcgcgacggcacggccagcgcgcaaaccggaggtcaatcatgatgagtacacccgcggtatcccatcgttttctcgtcaattttttatttaacaacatacccaatccgtttgatatcgcgttccagcgcatatccggcctgtcgcggacactggaagtgagccagcaccgggaggggggcgagaatgtccgcaacctctggctggccgagcaggtgaatcacggcagcctggtgctggagcggggggtgatgaacgcctcccccctgacgctgcagtttgaccgcgtcttgcgccgggaaagcacgcagtgggccaacgtggtgatcatgttgctgaacgagctttcattaccggtgaccacctggacgctgagccatgccctgccggtgcgctggcagatgggcgatttggatgccggcagtaaccaggtgctcatcaacacgcttgagcttcgctatcaggatatgcgcatgctgggggtaaaactatgaccgtcgaaattcgtgagttgatcgtccaggttgaggtcaccgagcctgccccttctgccccgtccttaccgtttgcgcagcaccgtgagtgggacgatcagcggtgggtggagaggattaaacaagaggtgctggaacagctgcttgaaagggggtgtctgtgagcttacttgaacggggtttatcgaagctgaccctcaacgcctggaaagatcgcgaagggaaaatccctgcgggcagcatgagcgcgatgtataacccagagactattcagctggattatcagacgcggtttgataccgaagacaccatcaacacggcgtcgcaaagcaaccgctatgtgatttccgagccagtcggcctcaacctcaccttgttgttcgacagccagatgcccgggaataccaccccgatagagacgcagttggcgatgctgaaatccctctgcgccgtggatgcggccaccggatcgccttattttctgcgcatcacctgggggaaaatgcgctgggagaataaaggatggtttgccggccgggcccgtgatttatcggtcacctacacgctgtttgaccgtgacgccacgccgctgcgggccaccgtgcagttaagtctggtggcggatgagagctttgtgattcagcaatcccttaagacacaaagcgcccccgaccgtgcactggtcagcgtaccggatctggcctcgttgccgctgctggcgctcagcgccggcggggtgctggccagcagcgtagattacctgtcgctggcctgggataacgatttggataatctggatgattttcaaaccggggattttctgcgggcgacgaaaggggaggaggtatgagccacatcaccctggacatagcgggacagcgcagcacattggggatccgtcgtttgcgggtacagcagcttattaatgagatcccgctggcgcagctggagctgcatattcccacggataatcatggcgcagcggataacgcggtacaacacgaagtcagtcgtttcaccctgggcgtccgcgtggggattgcacaggataacaagccgcttttcgacggttatctggtgcaaaagaagatgcaactgaaggggaaagaatggtccgtgcggctggaggcccgccacgcgttgcagaaactgacgttcttgccccatagccgggtatttcgtcagcaggatgacagcaccgtcatgaaggggttgctgcagtctgcgggggtgaaactgacgcaagaatcggcggcgcaactgagcagcaagcacgatcaactgctccagtttcgtctcagtgactggcagtttattcgcagccggctcctgtccaccaattgctggctgctgcctgatgccgccagcgacacggtagtgatccgcccgctgtccgacgcggcaatggcctcacggacgcttgctcgcgacagtcacgactatacgctgtatgaaatcaatttgaattttgataaccgctttaccccagacagcctgtcactgcagggatgggatattgccgcacagcggctcacggcggcgcaaaaaagcccggccggcgcgtttcgtccctggaaacctgcaggtaaggttggccagtcctccgccgggcggcaagactacgccctggcgttcagcatgctgcctgaagctacgctgcaaaccctgtcgaactcctggctgaactatcaacaaatgaccggcgtacagggccacattgtgctggcggggacccgggacttcgcgccgggcgagagtatcaccctgagtgggtttggggcggggctggacggcacggcgatgctgagcggggtcaatcagcagtttgatacgcagtatggctggcgcagtgagctggtgattgggctgccggcgtcaatgctggagcccgcgccaccggtgaggtcgctgcatattggcacggtagcgggttttaccgccgatccccagcatctggatcggattgccattcatctgccagccctgaatctgcccgattcgctgatttttgcccgcctgagtaagccgtgggccagtcacgcgagtggcttctgtttttaccctgaacccggtgatgaagtggttgtggggtttatcgacagcgatccgcgttacccgatgatcctgggggcgttgcacaacccgaaaaataccgcgccgttcccaccggatgaaaagaacaatcgtaaggggttgatcgtgagtcaagccgaccagacgcaagccttgatgatcgataccgaagagaaaacgctgaggctgatggcgggggacaataccctcactttaaccggcgaggggaaccttactatgagtacaccgaacgccctgcaattgcaggccgatacgttgggtctgcaggctgacagtaacctgtcgattgcgggtaagcagcaggtggagatcaccagcgcgaaaattaacatgaaaaaataacctattacggtgaggttgctatgagtaacgacattttgaaagcgaccctggggcaatgctgggcatttccaccgcggttttcccccgacacgggcgtgtccctgacggcgggcgttgaggcagtgatgcagagtctgcgcgtgctgtttatgactgaaccgggcgaacgcattatgcgtgagagctatggcgggggtatgcatgactttatctttgagaatatcaccgatgaactgctggccaacatccacaaccgcatcgaagaaagcattctgcgccatgagcctcgggcgctgctcaaggacgtcattatccagccggacaaacaggaagcgagtcgtcttcgggcgcagatcaccgtgtatctggcaggctcggatctggtcgagacggtggacggtacgctgaacattcatgacggccagacgctgaggttactatgagcaacctggtggtcatcgacggtgacgcgctgacattcaacccgcagtttggcgctattacgatcacgccaccgccccagccacgaattagcggcagcggtgaggccagcatcggggggaaaaagatctgcattgttggggatgaaaagcaggtctcctttaccgttgactatatcaagcctccctttgtcgcttccccgggaaaagggacgctcaccatcaaagcgttggcgtccgagcagcgggctgagtttgcgacggcaccggcgccgatgattgtggtcggcagccagtttacgacgcaatttcagcccacaacaccggcccaggatccacaaggaaaaccggatacggatctgagtgctgtcaccggggttgggacatttatcaacagccagtcgtttgtcaccgccgggtgagtcatcgtgctgccgatagggcggaaacgggctcctgcgtgtcttctttatcatcacataaccaatggacaacattatgtctgacctggagcaactgaaacagatattgggcaacggattaacagaccagaccttcctgctggagccacggacagggaaggggctgctcaatctgatggcaaaatataccgaagccgtgccgtttgccggccataccgacgctgactggaaagacttctggatggccggctgcacgctggaagcgctgagtgacatctatcagtaccccgggctggcagagaaaaagctgccggtgcagcaggcgttcctgctggcgttgctgcatctgctcgaaacgcccagagccatgctgaacacggtgccggcgcggcaccgttcactttactaccgggatttattggggtttgccccccgcgccccgcagccggacagcgtggcggtgagctttacgctgcaaagaaattcgtccccgtatgcgttacccgccggcagcctgctggatggcggccaggacagcgccgggaacagcatcacctatcagactgacgacagtctgctgatcaccggccagcaactggaacagttgtgctggacagcccaggttggggagacgtggaaacggtataccgccatcgacagcgcgacgggcgttacgctaccggctgaggggctgcgtctttttaccgcaacaggacaggggaccgacaccaaagagaaggcccccgagctttatctggggttcagcgggacgtctgcgcaggacaccctgtcgctttactggtctgtgcgcgcctcatcggcgctggatgtcacctggtggtattaccaggggaccaaatgggcctcgctggatgccgagctgcaggacaatacagcgtccttgtccgtcagcaacctgtggcgggcgcggctgccggcagacagtcagccggggagcggtctgccacaggacgacgagccgctggaggccgggtattactggatcaaaggcacgctgaaagaaaataaagaggcaaaggacgagaactcgcccgccgaggccatgccgcaactgcaggccgtgctggccaatgcgatgaccgcgaccctgaatgtggcgcaggcgattgatgacagccacttttcccagccgctgccagccaacacgatcaaccagcttgtgacgccagttgccgccatcagcgacgttcgccagcccctgccctcggtaggcgggcagccacgggaaacggagatggcgatgttgcagcgtgccgcgccccggatagcccaccggcagcgggctatcacctggaacaatatgcgcagcctcctgatggagcactacccagagatttttgatgtccgttttcccgatgtggacaaactgagtcgtctcccggcgcttgaggtgcaatcgctgatggttatccctgacggtcgttatggtgataacgatgacgcgctgcgcccggcattgagtaacggaaggttgagccggatggcgcaatggctgtcgcagtacacttcgctgtgggcggcgccgacgctcaagaacccgaaatatatcgatgtgacggctcgctatcgggtgacgttcgtggtggggattcgccctgattatggttatcgtcagctcgcggcgcagttacaacacgactatatgccctgggcgaccgatcgacgccaggcggtaacaccgggcaatcaggtggactactaccagctgctggccacgctgcaacagtcaccgctggtgcagtccgtgaacgcgctggttcttagtcacgacgttattgatgaaacgggaaaacccacatcgatggaaacacaaagtaccgtcaccgccagggatgatgaggtcctgattttgtgcccggaaggagagacccatgtctaaagaaaacgccctgttcccggcggtgaaagacgcgattgtgtttgatgcgctctggcaacaggctcacgagaaagtcactgcgctcagtggtgagatctggacggataccggcgatcacgatccgggcgtcactctgttacagtccgcgacttggaactgttccgacctcagttaccgcgcgtcactgtcgctgaatgacctgctgacccatcaagaccagagcaccttgttcccggaagagttcggtcctgaacaggtgcttacctgtaacacggtgacggcagaggattaccgccgggccttactggacgtgcacagcagcgacattcaggccctggacacccctgagcaggattttttattcagcgatgtcagcctgactcaagaacctaaagagcaccgttttcactggtggtataacgcggaaaaacgcgaatacagcttcaggaagccgacagacagcggtgaagtgaacgaattgaaactgcgggggaatctgtggctttcgctggtcccgacccgctatacccagtccctgtcgcccgagaacctggcggcagtggagcaatgcctggctgagtttcttgcggcgcaccgtaatcttggcgaagtggtgtctcgtattacctggctgcaaccggcgacctttagcccgcggatgacgattgaactggccgataacatcggcgatatcaatcaggtggcggcgcagatttatcaggtcactgacgcgtttttgcgcccggcggtcgcccgttataccaccgaacaacggcgtgcgctcggtgatgccgatgacgccatctttgaggggccgaggctgaaacacggctggcagcaaacggcaccctcgcagatcacctccgggggttacgtcctcaacctcggcccgctggtgaacctgttgctggctatccccggcgtggccagcctgagcaccttgtctgtcgataaaggcgatggccacattacggccgttaccggggacaacttgcgctggcaagtggctgacggctattaccctctgctgtggggggcgccgccgctgagcctgctagcgggtgacgatagtccgttaaccctggtgtcgaaaggcggtattcgcaacacgctggagagtgaggcgatggcgggttacctgacacaggcagacctgatcgtcacaacgcccacggtgttacccgccggccgctttcgtgatcagacgctttatattcccatcgggcagcgtcagcccgaatgctatgccctgcagcagcccgataccgtgattgacgaccagacgcgcgcggtgcatcagtttctgctgcctgtcgaccaattgctggccgacggtacggcagagctggcacagctgcctaccttactggcatttaaaaaccgaggcgacgccattcgggggacccgctggccctatacgaatgcgatggtgcagcaggctattcatcagccctacgcgaaaacgctggaagcaattgcgcagcaggatgcggctatcttcacgcaggataagcagcctgttgggggcaattatgcccgcgaactggattttcttcagtatctgctggggtattttggcacccagcgggccgccctgccgctaacgctggatttgcctgattttctggcgacgcagcgggcgtatctggcgcagcaacccgccttaggttacgaccgcatcaatatccgtattgaccaggtttccgccctgcaaaagcgtattgcggcgcgcatcggccttgacagcatctgctttgctgataatccggacctgggtcaactgccattttacctgattgagcatcgtcagctgctgccccagaccccggacagcacctttgacagtgaacagaccccgtccggttttgcggtggccgaacccgacattacgctgacgcaggcgggcagtgtcggcaaggtggtccaggggcagcttatcgaccttattgcgattgaagggggcagtcgactgcatgtcagccggctgctggttattaaggccgagggggacagttttaccgtcagcacggaaaacagtcagcaactgcacaacaccctgtcacggcttgagacggcctgggcgagtcacaacctgcgctggcaaaacagcaatgtctggctgcaggatatggattaccggctgaattatgctgaggcaaaactgcaaccggctaatccacagcagcgcttactggcgagtaacgcgcaatccccgtatcccgccatggtcagcgtcggtgatggcattgtcctgcgccccgcgggcctacagttttacatgccgggggcaaacgccacccgtgctgccactcttgatgctgactggcagcttgcggcgaccgttaaagcggtcgatccgattgcgggcacgttgcttatcgaaaaagcggccggcagcacagaggattttccctcagcggagagcagcttccgctaccagtgggcgtttagccaggcgaactatgcgacgacagacaggttctcttttgtggtcagcgcggtgctcaatcgccgtctgatagagaaccccaatatcgtgcctgagcagctggttgcctggatacaggaaaccattatggcggagttcccggcccacgtgtccctgattaatcactggcttgatgacgccacctttaacaactttggggtgacctattcgcgctggcaaaacagtggcatgccgctgggcgatgatgcttttgcgctgatgcaaatactgaccctggggcatctccctgttacccaactggacatcggcctgatgcgcatcgccaccgaggagcagcgcaccgaggttatcggtgacggcagccagtggcatgaagacgttattctgcgagaagagctgttctacgtgccgaaagacgtacaaaccaccctttaacatcatgacgaatctggagagcaaaatgacggacaaaacccctaagaaaacggcagaaaccccagtgaatacccaggcgaccttagccgacacaacggacacagcgcgtgacagcgagccaaagagcagagccttgccccaggccgatgcgctgaaggcgcgctttaaggcgggcagtattccgctgcagacggactttgcggacctgattgatctggccaatatgggacgtcaggcggtgggcggagcagaggggcaaaccgggccggcaaatgggtttaccctttcatcggagggccttcttgaattaaaacccaatgcaactaaagggattgtggttgataaagacggcattgccgtcaaggcagaggcaagtaaggggcttcaggtcaccagcaacggtgtaggcgtacaagccgggaatggcgttgcggttaatggtagtggcgtgaacgtaaaactggcgaacgggactgctagcgtcactacgggtaatgccggcggattgacgttagctgcggcgggcttatccgtacaggccgggagtggtattagtgttgccaacaccggcgttgccgtacaggccgggaatggtattagtgttaccagcactggcgttgccgtcaaggcggaggcaagtaaggggcttcaggtcaccagcaacggtgtaggcgtacaggccgggaatggcgttgcggttaatggtagtggcgtgaacgtaaaactggcgaacgggactgctagcgtcactacgggtaatgccggcggattgaatttagctgcggcgggcttatccgtacaggccgggagtggtattagtgttaccagcactggcgttgccgtcaaggcggaggcaagtaaggggcttcaggtcaccagcaacggtgtaggcgtacaggccgggaatggcgttgcggttaatggtagtggcgtgaacgtaaaactggcgaacgggactgctagcgtcactacgggtaatgccggcggattgaatttagctgcggcgggcttatccgtacaggccgggagtggtattagtgttaccagcactggcgttgccgtcaaggcggaggcaagtaaggggcttcaggtcaccagcaacggtgtaggcgtacaggccgggaatggcgttgcggttaatggtagtggcgtgaacgtaaaactggcgaacgggactgctagcgtcactacgggtaatgccggcggattgaatttagctgcggcgggcttatccgtacaggccgggagtggtattagtgttaccagcactggcgttgccgtcaaggcggaggcaagtaaggggcttcaggtcaccagcaacggtgtaggcgtacaggccgggaatggcgttgcggttaatggtagtggcgtgaacgtaaaactggcgaacgggactgctagcgtcactacgggtaatgccggcggattgacgttagctgcggcgggcttatccgtacaggccgggagtggtattagtgttgccaacaccggcgttgccgtacaggccgggaatggtattagtgttaccagcactggcgttgccgtcaaggccgggaatggtattcaggtcaatacgaacggtgtggggctaaagagcaccgcctggataaacgtgatgtgtggacttcataatgccactttctatgtgtacagcagttacttttgcgcattcttttgtaattattctaatggctgcgttgcatatgtatacggtcgaggagctttttatctgtccacagttagtggtgatatcaaattgaattcagtctctcccaatcaaatattagcaatgacgggaggttcatcatcagcggtaaccatgatgtcttggacatcaacgaaagctgctgagggtatttcattagaataccaaaggaagagcttaataaattctagcagtattagtggcagcgcatcattggtttccgcaccataatgactagaaattttttatatactcccagtattactatacaaaagtgtcgtgttaatgtggtttctctgtcgccagagaaacaccggctacatgcttatttatttaccagggagaatatcagtaaattattatccctggctataaataagcatcggacagaggagagcatccatattaccaaactggtgcttaatttaggcgttattccggaaggacacttttcgacgctgtttaaccaacgatttgcgcaggcgttagagcaatgtatggaacagttagccactcaggctcatacacaaaacacacggcttgctcatgctacaccagccgagttgctggcgcacgttgaaagtaatcctgaggcgctcaccccattggctatttgctgcctgcaacagacctcgttgctgcaattgttacaaaacgggcaaccccagtatttgcggggtttattaaaacgactgctacaaagggaagataagcactcgtcagcgttagtggatacttgttatagccgggtgaccgccagccgtttagggatagcggcgctgtgctacctgcagcatcaggcgcaaggacatgactggctgagtcagcatacccccccagccagtcaagtgattagctgggcaaaggcgattgctcagggtgaaattccacctgaacagcttgcgcggttaatgaccggcaattggccttccgatagcgcattgcccgagcaacgagcctattcccccttggtcgtgatgcgttggttgttgccactatggcgacaacccgccgtgcgccaggtgattcatcgactgaaaggagggcggggggtgcaattggttgatgcttatctgagtcgttgtttacaactgcaggatgatgacgccatgcgggaggaagaagggatgcatccagacctccagcaggttgagctaccgctcgataacaccgtgttgctggagggcgaggaggagcataccgtgcgggatcatgccacgttgccgcagggcaaggagaggccgtccgatcccaaacgggttgcactactgcgggataacgccacattgccggggagtgaggagatgccgacaacatctcggtgcacgatgcaaccgagggaaggcggtctccgctcgccgaatgaacagctctcgccgagtcaggatatcagcaatgccggtttgctccttctgtggccgcttttgcctcagctgttttccctgctgggtctgcgggaggaagagcggtttgtcagcgatgcggcgcggtggcaggccgtgtacggtctcgatcgattggtctggggggaggttaacccgacggaggaccggttgatgttgaatctggtgttatgtggggtgtccggctcaacctccgtaacgccgccgacaccgctgagtctgctgcaactgcaacagattgacgcctggctggccgctatcggccaacaacttcccggttggcaaaaattgagcctgatggatattcggcagttgttcttgcagcgggcaggtgaaatcagcatggaaggagcattcccccaaattagtgtgcggccggaaccctatgatttcttactcagagattggccgtggccaatgacgctggcgtctttcccctggactgaacagccactgactatcgtctggccgctaaccgatttcacaggataaaacagccgctattttctcttcttatcggatatcaacatgacgctttcttcaacctttcagcccgcgtttattccgcagggtgattgccagctatcgctattattcagcgagctggaacgcatcgatctgctattacagcattattattaccgccattcagcacgtcacgaggattttaacgcgtttctgcttagcgaagaggaggttgaggcgcgaatgaaacaccctgtcggcaggcctcattgggccgctgccacgccgccgatttaccggacggaaaacgggcagccattgttaaccgaaggcttaacggacctgattaatcgtttcgaactcactgattttgaaagagacacggtgttattgggattgctgccccattttgacagtcgctattatgagctgttttcctggatccaggggggaaagcaaagtcaactgcccagtttttcattggccttaacgctattttgtccttcagatagggagagacgggcacagcaagccagttttttgcatcgggcaccgttaatgagctgtcagctattaacgattgaggagaataaaaaaaatccggcatggagccacacccgctttatgaccgacagcagtgtgtaccattttttactcgggcatcattatctggcgccggcgttagcgtcatgggctgaatggccaatccccccggcgttgcctttttatcctgccggcttaaaacacgcgctggcaggcgtgttactgactgacgatatcgagccgcgccccgtggtgttgctgcgcggcatgccgggtagcgccagagcccatgcggtgtcgagcatttttgcctctgaaaaccggcagacgctgcaggttgatatcgataagtgcaccgagagtgatgacgatgcgctgctactgcatttaacctgtctgatgcgcgaagcccgtatgcgcggcgcgggaatggtgatccgcaacctgcaggcacggatggaaaagagcacgtcactgccggagaggttatctgagcacctgaaccagccgggattaagggtggtgtgcctggtcgaaccctatgccccgcctttatggctgaaaaaaacgcccaccttgcagacagagatgccggtgttgacgcaggaggaaaaaacgcacctgctcatgggttgtctgcctgaacgacgcgcggcggatattgatcttatcagtttaagccagcgctacacctttaccccggaaagtctgccgctgattgtgcaagaggccgaactgtatcggcagcaacgtgacccggcggatgttctgcaacagtgtgatattcgtcaggcgctcaatttacgcacccaacagaactttggcgcgttagcgcaacgtattacgccgaagcggacgttaaacgacctgttggtgtcagagagtctcttgcagcaactccaggagatgttgacggccatccgctatcgggaaaaagtcctggccggcggttttaaagataaggtgggctacggcgtcgggatcagcgcgctgttctacggcgactcgggaaccgggaaaaccatggcggcggaagtgctcgcccataccctgggggtggatttaatcaaggtagatctctccacggtgatcaataaatacattggtgaaaccgagaaaaacctctcccgtatctttgatttggcagagcaggatgccggtatcttgttctttgatgaggccgatgccttatttggtaagcgcagtgaaaccaaagatgctcatgaccgtcatgccaatattgaagtgtcttacctgttacaacggctggagaattttcctgggttggttattttatccaccaataaccgcagtcacctcgacagtgcgtttaatcggcgatttacctttattacccgctttacttatccggatgaaacgttgcggcataaaatgtggcaaaaaatatggccgaagcacattaaggtttcaccggacgttgattttgaaaaattagcgcagcgagcaaatatcaccggcgcaaatatcaggaacattgccctgttagccaccttctttgctgaagaaagtggcaatcaagaagtcagtcacagccatatcgacgcggcgttaacccgtgagttggctaaaacagggcggcttgcgctgtaacctgctgcctaaacagccagaacacacaacaccatcatggacagtgatgacttactattaatgcagaggaatgagtatgtctaattatcaaacgctggtcgacgtgaataacgcgatgaataagatgttgcgcgcttatgtgaatgaggccgtggcaatccgctttgatttaccggatgtggatgccacgcaggcagatgccgcgataagcgtgtttctttatgatatccacgaagacctgcagctgcgtactgcagagtcccgcgggtttaatgccggcgcaggacggttattacccggttgggtcaacgtgaagtgcaactaccttattacgtattgggaatcaaccggccccgccacggatgccgacaacccggacagccagcccgacaaccaggctatccaggtgatgtcccaggtcctggcggcgttgattaacaaccgccagttagccgatatccccggggcttacacgcaggttatgccgcccaaagaaaacctgaatagcctgggtaacttctggcagtcgctgggcaatcgcccacgtctttcgctcaactattgtgtcactgtgccgattagcctgagtgataaaggcgaggaaatgaccccggtgaaatccttgtctaccaccgttgagccaaaagcgcccctttctccactggtcattacagatgcactgcgggagcaattgagggtggcgctagggggcgattatgatgcctgtcttgctatgacgcacgttaatctggactcctcaccggttgccaattcagacgggagtgcggctgaaatcagggtgtcgttgcgggtttacggtatgacgccgacagaatatcttgccccgatgaacactgtttttaatgaatgggaaaagagtgaagctgcggcggtcacgcccgatggctaccgtgtttatatcaacgcggttgataaaacagacctgactggtatttaaggatcctctagagtcgacctgcaggcatgcaagcttggctgttttggcggatgagagaagattttcagcctgatacagattaaatcagaacgcagaagcggtctgataaaacagaatttgcctggcggcagtagcgcggtggtcccacctgaccccatgccgaactcagaagtgaaacgccgtagcgccgatggtagtgtggggtctccccatgcgagagtagggaactgccaggcatcaaataaaacgaaaggctcagtcgaaagactgggcctttcgttttatctgttgtttgtcggtgaacgctctcctgagtaggacaaatccgccgggagcggatttgaacgttgcgaagcaacggcccggagggtggcgggcaggacgcccgccataaactgccaggcatcaaattaagcagaaggccatcctgacggatggcctttttgcgtttctacaaactcttttgtttatttttctaaatacattcaaatatgtatccgctcatgagacaataaccctgataaatgcttcaataatattgaaaaaggaagagtatgagtattcaacatttccgtgtcgcccttattcccttttttgcggcattttgccttcctgtttttgctcacccagaaacgctggtgaaagtaaaagatgctgaagatcagttggggcaaactattaactggcgaactacttactctagcttcccggcaacaattaatagactggatggaggcggataaagttgcaggaccacttctgcgctcggcccttccggctggctggtttattgctgataaatctggagccggtgagcgtgggtctcgcggtatcattgcagcactggggccagatggtaagccctcccgtatcgtagttatctacacgacggggagtcaggcaactatggatgaacgaaatagacagatcgctgagataggtgcctcactgattaagcattggtaactgtcagaccaagtttactcatatatactttagattgatttacgcgccctgtagcggcgcattaagcgcggcgggtgtggtggttacgcgcagcgtgaccgctacacttgccagcgccctagcgcccgctcctttcgctttcttcccttcctttctcgccacgttcgccggctttccccgtcaagctctaaatcgggggctccctttagggttccgatttagtgctttacggcacctcgaccccaaaaaacttgatttgggtgatggttcacgtagtgggccatcgccctgatagacggtttttcgccctttgacgttggagtccacgttctttaatagtggactcttgttccaaacttgaacaacactcaaccctatctcgggctattcttttgatttataagggattttgccgatttcggcctattggttaaaaaatgagctgatttaacaaaaatttaacgcgaattttaacaaaatattaacgtttacaatttaaaaggatctaggtgaagatcctttttgataatctcatgaccaaaatcccttaacgtgagttttcgttccactgagcgtcagaccccgtagaaaagatcaaaggatcttcttgagatcctttttttctgcgcgtaatctgctgcttgcaaacaaaaaaaccaccgctaccagcggtggtttgtttgccggatcaagagctaccaactctttttccgaaggtaactggcttcagcagagcgcagataccaaatactgtccttctagtgtagccgtagttaggccaccacttcaagaactctgtagcaccgcctacatacctcgctctgctaatcctgttaccagtcaggcatttgagaagcacacggtcacactgcttccggtagtcaataaaccggtaaaccagcaatagacataagcggctatttaacgaccctgccctgaaccgacgaccgggtcgaatttgctttcgaatttctgccattcatccgcttattatcacttattcaggcgtagcaccaggcgtttaagggcaccaataactgccttaaaaaaattacgccccgccctgccactcatcgcagtactgttgtaattcattaagcattctgccgacatggaagccatcacagacggcatgatgaacctgaatcgccagcggcatcagcaccttgtcgccttgcgtataatatttgcccatggtgaaaacgggggcgaagaagttgtccatattggccacgtttaaatcaaaactggtgaaactcacccagggattggctgagacgaaaaacatattctcaataaaccctttagggaaataggccaggttttcaccgtaacacgccacatcttgcgaatatatgtgtagaaactgccggaaatcgtcgtggtattcactccagagcgatgaaaacgtttcagtttgctcatggaaaacggtgtaacaagggtgaacactatcccatatcaccagctcaccgtctttcattgccatacggaattccggatgagcattcatcaggcgggcaagaatgtgaataaaggccggataaaacttgtgcttatttttctttacggtctttaaaaaggccgtaatatccagctgaacggtctggttataggtacattgagcaactgactgaaatgcctcaaaatgttctttacgatgccattgggatatatcaacggtggtatatccagtgatttttttctccattttagcttccttagctcctgaaaatctcgataactcaaaaaatacgcccggtagtgatcttatttcattatggtgaaagttggaacctcttacgtgccgatcaacgtctcattttcgccaaaagttggcccagggcttcccggtatcaacagggacaccaggatttatttattctgcgaagtgatcttccgtcacaggtatttattcggcgcaaagtgcgtcgggtgatgctgccaacttactgatttagtgtatgatggtgtttttgaggtgctccagtggcttctgtttctatcagctgtccctcctgttcagctactgacggggtggtgcgtaacggcaaaagcaccgccggacatcagcgctagcggagtgtatactggcttactatgttggcactgatgagggtgtcagtgaagtgcttcatgtggcaggagaaaaaaggctgcaccggtgcgtcagcagaatatgtgatacaggatatattccgcttcctcgctcactgactcgctacgctcggtcgttcgactgcggcgagcggaaatggcttacgaacggggcggagatttcctggaagatgccaggaagatacttaacagggaagtgagagggccgcggcaaagccgtttttccataggctccgcccccctgacaagcatcacgaaatctgacgctcaaatcagtggtggcgaaacccgacaggactataaagataccaggcgtttccccctggcggctccctcgtgcgctctcctgttcctgcctttcggtttaccggtgtcattccgctgttatggccgcgtttgtctcattccacgcctgacactcagttccgggtaggcagttcgctccaagctggactgtatgcacgaaccccccgttcagtccgaccgctgcgccttatccggtaactatcgtcttgagtccaacccggaaagacatgcaaaagcaccactggcagcagccactggtaattgatttagaggagttagtcttgaagtcatgcgccggttaaggctaaactgaaaggacaagttttggtgactgcgctcctccaagccagttacctcggttcaaagagttggtagctcagagaaccttcgaaaaaccgccctgcaaggcggttttttcgttttcagagcaagagattacgcgcagaccaaaacgatctcaagaagatcatcttattaatcagataaaatatttgctcatgagcccgaagtggcgagcccgatcttccccatcggtgatgtcggcgatataggcgccagcaaccgcacctgtggcgccggtgatgccggccacgatgcgtccggcgtagaggatctgctcatgtttgacagcttatc

SEQ ID NO: 58 - protein, 149 aa, Serratia entomophila; identical to SEQ ID NO: 2

SEQ ID NO: 59 - protein, 354 aa, Serratia entomophila; identical to SEQ ID NO: 3

SEQ ID NO: 60 - protein, 451 aa, Serratia entomophila; identical to SEQ ID NO: 4

SEQ ID NO: 61 - protein, 417 aa, Serratia entomophila; identical to SEQ ID NO: 5

SEQ ID NO: 62 - protein, 149 aa, Serratia entomophila; identical to SEQ ID NO: 6

SEQ ID NO: 63 - protein, 54 aa, Serratia entomophila; identical to SEQ ID NO: 7

SEQ ID NO: 64 - protein, 228 aa, Serratia entomophila; identical to SEQ ID NO: 8

SEQ ID NO: 65 - protein, 528 aa, Serratia entomophila; identical to SEQ ID NO: 9

SEQ ID NO: 66 - protein, 140 aa, Serratia entomophila; identical to SEQ ID NO: 10

SEQ ID NO: 67 - protein, 139 aa, Serratia entomophila; identical to SEQ ID NO: 11

SEQ ID NO: 68 - protein, 607 aa, Serratia entomophila; identical to SEQ ID NO: 12

SEQ ID NO: 69 - protein, 961 aa, Serratia entomophila; identical to SEQ ID NO: 13

SEQ ID NO: 70 - protein, 636 aa, Serratia entomophila; identical to SEQ ID NO: 14

SEQ ID NO: 71 - protein, 535 aa, Serratia entomophila; identical to SEQ ID NO: 15

SEQ ID NO: 72 - protein, 696 aa, Serratia entomophila; identical to SEQ ID NO: 16

SEQ ID NO: 73 - protein, 293 aa, Serratia entomophila; identical to SEQ ID NO: 36

SEQ ID NO: 74 - DNA, 12877 bp, Serratia entomophila
  primer_bind 7993..8033: note = primer SE_Afp18_p11a_Stop_RV
  primer_bind 8031..8058: note = primer pET11a_C3CTS-Stop_lin_FW
  source 1..12877: mol_type = other DNA
  CDS 933..8033: note = SEAfp18 toxin
tggtcagagacatcaagaaataacgccggaacattagtgcaggcagcttccacagcaatggcatcctggtcatccagcggatagttaatgatcagcccactgacgcgttgcgcgagaagattgtgcaccgccgctttacaggcttcgacgccgcttcgttctaccatcgacaccaccacgctggcacccagttgatcggcgcgagatttaatcgccgcgacaatttgcgacggcgcgtgcagggccagactggaggtggcaacgccaatcagcaacgactgtttgcccgccagttgttgtgccacgcggttgggaatgtaattcagctccgccatcgccgcttccactttttcccgcgttttcgcagaaacgtggctggcctggttcaccacgcgggaaacggtctgataagagacaccggcatactctgcgacatcgtataacgttactggtttcacattcaccaccctgaattgactctcttccgggcgctatcatgccataccgcgaaaggttttgcgccattcgatggtgtccgggatctcgacgctctcccttatgcgactcctgcattaggaagcagcccagtagtaggttgaggccgttgagcaccgccgccgcaaggaatggtgcatgcaaggagatggcgcccaacagtcccccggccacggggcctgccaccatacccacgccgaaacaagcgctcatgagcccgaagtggcgagcccgatcttccccatcggtgatgtcggcgatataggcgccagcaaccgcacctgtggcgccggtgatgccggccacgatgcgtccggcgtagaggatcgagatctcgatcccgcgaaattaatacgactcactataggggaattgtgagcggataacaattcccctctagaaataattttgtttaactttaagaaggagatatacatatgccttactccagtgagtcgaaggaaaaagaaacacactcaaaagaaaccgaaagagataatgctgacccagtatttcaacgggtcagccagggcggcgtgggtgtttcaccgcctgatgaggggggagacttgtcggccggaagtaacaatgaccatttattcgcttttattcgtgaaacacacttggaagaagcccaggaattcaggctaaaagggtataacagccaggtgcccgaggttgacgagggattactgacgcagctgcgtgacgacctggcggcggccaaatcccgccagtacgttcaggcaagcgttggggggccgctgggttctcggtggctgctggaacagataggcaaaatagagcggctgacggacaagttttctgacgaagtaataaaacgctgggttaagcatgagctgccacgaaaaaacgtaggggaagccgcggggaccgagttggggagccggcgtagggctcagtcgctggccagacggttggagtcaaccatgcagacactgatccgcgttgtccataccctgcatgctatggatgactacagtaccccggaaaaacggcacgacatgctggtcgctgagcttaccggcgcgttctcctccagtgataaaaatacggtgatacaggcgctggggagaatgacggcagagacgtcaggtcatgccgcctgggcttcccttatgcaggcccggacagcggcgtgggaggccggtaagtcagccaccgtcgatgcgatgattgcgacttcacagcacgaagcagaaaaagccaataaaaaagcccgtgagcttcagggcgattcacaggctttctttagtcatgtcgccgcctatcttcagagcctctccagcgatttggcaaaagtgtcgattaacatggggcagagcacctcttcctcgactatacggaacgaagcagaaaaagccagtgagcttcagggcgattcacagactttcgttagtcatgtcgccgcctatcttcagagcctccctagcgatttggcaaaagtgccgattaacatgtggcagaatatggattttgttaagacaaaattacaagcgcaaactgcagttgcgggaatgaaagtgcatgcgcaccggcttgtccggatcgcacagcatggtcactccaccaaaacccctgcgaaggatcccgaacaggtcgttaccgattccatcatcagaagcattttatggctgtggcagcagccggccatcaaaatccagtgcgccagcactgcgttgttgtcaaaagtgggtgagctgaaaaaaattgaggggatactggcttcttacgccgtgacggatgagctgggaaacgaacaagaacgccgcaaccctccgggtgaggaggacctggatgcacagctcagggaatgggtgagcgccagccttaagcaggaaaaccccgaaaaccagcgggcggtaaaagtggtgacgctggagcggctgctgggcggtgatatcgccagtgcccgcaacctggtggaacgtctgggaaaagcggaagagggtattcagaatctgctcaggcggcagcaggttgctgtcctgaaaatgtcagttgagcgcttgcctgccgctgtttcctctctgaaggccgtggataaattactgccggatttggcaggtgacctcacggcgagtatcgccgccctgagcaacgcccttcaggcagccgaataccccgcccgcgactttagcgaagcaaaaatacaggccggctatgcacaattgtgggcgacaaaggtgaaggaaagtctgtcggcagcgtctgcacggctgaccgaaagaccgctggatgaacattcacggggcgcacgccttgccaaacattgggcaaacctcgccaaagaacggagcgtgggtaattatccgccgccggatgcacagcaggtacttgcctccctgaaggaacaggggctattagcggggaccctttcaaccggagatccggccgggtatcttttcgccacccggcttgccggtgagcttgaaaatgccggtaatggtgaattgcgattaccgatgagtccggagcaatatgttgctttagagaagggacttgttgagtatattgtaaaatggggacaacggcggatctcacaaggagtcacccgcattgttattgagttgtcctttgagcaggctctggatacggtatcgttcaacgtgtccaagctcttccggttaccttataaggtgctgaaggcctcgataaaaataccgtacaatgtcaataaggttaataattataccatgccgggccatgataagccctataaggcaatttatggcttgctgggaaaaaagcttaagcaacttggctttaatttactgacggcacccgtgcctggcgtgatgaaacttgtggctggcaccgggataaccgcaggtgcaggcgtgcataatttacgtgtcgaaaatagagagaaaacattcagcgcggtttatcaacacgtggtggaaggaaagcaaagtgaaaaaataaaaatggactccgtgaagtcgatgatttttgattcagtgctcgataccgccactacggccgcttttaaagggggacgaagagcctggcaatcaggaagaaataaaaacgacattgaaatcaatgaggtaacactttctcaagcacagcagcgccaagtggcagccaacaatgttgacactgcatgggggaatgctgctgcgaatgagaggaaggttgagccagtgagtcattcatcaccattacagcaacaaaccgatgttaggccgttctctgataagagtgaccaggatgctgctcaacctcgagtacgtaaacgggcagtggcggatatggctccccctccccctcatcaatggcataataacattcctgccaacacgacgctacagtcagaacattttgattttgatcgtgacatacgttatcagggcttctccgatgagaagaaaaaacaaacctatttacatggtattcaacttgtattgcttcagatacaaaatgatggacgctttgcacagaagatcaggaataatgcctaccttgccagtataggcgtttcgaacttagtacctgtcgatatagaaggatataaacttaaaaatacatttcttcttcctgatagcccaagtgctaaatctggagttattgttcgcttagattctgaaaatccttattactatgttggcaaagggagtgatcttttagaagacatcaaatgggccatgcctcatgatgctaatgaacagaagtatgaatatatgcctgattctgatgggaacgctcacttttaccgtctgcgcaacggttttgatatctttaatgatattaggatggggaattcaagtttcgaatatttctttaattataataatccggagccgataagcatcacgagactttcttcatatcttgcaaatactattgagggtgactataaaaacggatcgtcgcccccaaaaaacaaactattaatttccagagcgattactggtgctcatattcctgacccaggggtcactgcaaccgccgctggatatcatatcgaattcacctgggataatttgacttcagcagagtatctgaggtcattttcaaggcccttctctaccctcagtggagaaatgcagttagtgtctagctccattaatggagaaacgatacaggaaacagagctgcatgttcatcaggctgaatatataggaagctgggttgatgctactgtcggggccatcacatctttcacgccggagggatgggttctcaataccacactatcggcagcggacattgctgctgatttgacagaagataaggatcctgacccaatggcggttgctggcctggttgtaggatgcattcctggtggtcggattgcagctaaagtcggaaagttcacccgtattggcggtaaggttgttaaatacgggcttatgcttggcaataaagcggtcgacctggccatcgtagggaagagcgttaagatagctgtagacacgggtgatccactcgcaatttataaggcgcttctgatcagtggcataggtactacgaattcttacgatatggcaaagaatatgtcatcaaagctaaaaatcagcaagaaactggaagacagtgttcaattagataaaccactacaaaatctaaggggaggaagcaagcgtcctgaagagggtgaatcaacctcgcagaagcgttcacagccagatgagagtccagaaaatagtcaggaggctgtatattcaggcccctccggcagagctcgggtgacttttgaccagacgaccgaacatcatataatgcttaatagattttccagacttgtgttagctagaagttttgcagagaaaagaatacagtcttttgaacacagttcttcgaaatttaaaagcagtgacgagtttaaggtagataaaagcatacctttagatgcacaaaatgcttcacttaacgacatggcgagtaagacagataacttaattaatcagctagaacaatttacaggagataagaaagaatccatttccgccaatctgaaaaacatccagttaatgattggtgatataatggaaaatagaaacaataggaatgataatttaaatttccatacttatgtcttggttgggaaaaatacaacatatgacgaaataagtaactattatggttttgctgagtttaaattttcaataaataatggcaatcttactcttaacaaccttataggccacccttatgtcgtcattaataaataccctgaatttagagattatttgataagaaatggagtcatcacccaacccgagcttgaaccatataacataaagaatgtggctcggtatcttggctctaaagcggtgagcagtgagattggttattatgaatccattccagctactaaagtgaagattctctcgtttactggagccaatccgattacgcaaaaattaggtaatacacttcagagtatctctgatcttttttcaaaaaaacgattttcggacgaaccgaatgacgccatcactcaggatgaactatttacccgtcagactgatttatatacttatgatgagatgataaatcatctaaaaactatagtaagaacgacattcacacctgttaaaccgatagaagaaatatccagtgaaaaaactgatgcggccattaaaggaataatgaccaatggggatgcggaaataatttccgaaaacattatcgagagcaaaaatagtttagaccatgatacaagttatttttctcatgaagttatttcagctgttgatcgtgcatatgaaaaagtaaactccgtgaaatctctttttgaacgtgcagaatctcagcctgagattaaatctcaattaaaatcattaattaatgaagccactggattgaatgatgaggttatcattgatattgataaagtagatgtttctagcatatcagacatggcctataacaggtttaaagataatatcaatactctacatgactatctctctaagcaaaaatcagggggttatacatcctttgttttatttaaatatcgccagtttaatccatccaagcctgatgcctttgccatgccctatgacagtaagaaaagaatttttctggctatgttgccagaaaatcagcgccatggtggattagttgatacggtgacccatgaagcttcacataattcttcttacacattagatcatacttatatagggaacgcgcggagtaacaccggttcatttccttcctcatttgaacctccaactcgagattcgaggtatttttatgaaaatgaacgggtaggtaaactgagtgcaaagtatgctttagacttacccgaaaatgctaatatcacccaaaatcaactagcgcaggcagatattctgttaagaaacagcaggttgactaaagcagatacgcttctgaatgctgcagaatataatgcttatatgattgacgttctaagccgggtaaaaataaacggctcacatattgagtttgaagaaaactcatccagaagcaaacgctctgtttccggaggaaatcataaacttgatgatataattatactggcttcgatgaacgctacgcttcctaggagggaggggggggaatttgagtcatctaccttcaagaaaacattaacggaatttataaacaagggtacgaccagcagtcaggttgatcctgtttatgcatcctatctaccagcgtttaataccattgtagatagcgagggtattacattgcaacaggtgaaagacttaaaatcagctctgcccgcaaccggcaacgatctgagggctcaagccagatataactatgcggtgctacaatatttatctgggtcggcaggaattaagctaccaattgatactgatgtaatacgaaatagcattaatgatgatctgaatattgcaagttgcgtagataactgtaaaaaggcagcctcacaaaggcttgagttgttgaaggcggtgccagaatatttatctgggccggaagcaattcacgcacagattgatactaatttaatgataaatagaattaagaacactctgaaacatgaaaattacacatatgatcttaaagtaaatgaaagggattatcttttattacagttggaacaaaaatatatagcttcgagtaaacctcctaaagtcggagctcaaaaatggagtgctgacataaataaagaaattaattatttatgcgatgagatcgaagaaaaaaaacgcgaggtggtttgttgggagaataagaagaatgaatcatcacgaagacttgatttgtggagtacggcgacgaaatatttatctgacccgaaaggaattaaaccaccgattgatactgatgtaatactcaataacattaatgatgttcttaatcatgctggctacgtatataactataaagtgagagaaaaggataatcttgagaaaaagttgagtagaacccccctaacaagtcagatagaagtgaaccgtttacaaaccgagatcgcaaaaagatatagactaatagattattgggggaaaaaagcagatgaaacattactaatgtttatcttgtggaggaatgtgtttggttaaggtacccttgaggtgctgtttcagggaccaggaggtagtggatctgcttggagccatccacagttcgaaaaaggtggaggttctggcggtggatcaggtggaagtgcatggtctcaccctcagtttgagaaataaggatccggctgctaacaaagcccgaaaggaagctgagttggctgctgccaccgctgagcaataactagcataaccccttggggcctctaaacgggtcttgaggggttttttgctgaaaggaggaactatatccggatatcccgcaagaggcccggcagtaccggcataaccaagcctatgcctacagcatccagggtgacggtgccgaggatgacgatgagcgcattgttagatttcatacacggtgcctgactgcgttagcaatttaactgtgataaactaccgcattaaagcttatcgatgataagctgtcaaacatgagaattcttgaagacgaaagggcctcgtgatacgcctatttttataggttaatgtcatgataataatggtttcttagacgtcaggtggcacttttcggggaaatgtgcgcggaacccctatttgtttatttttctaaatacattcaaatatgtatccgctcatgagacaataaccctgataaatgcttcaataatattgaaaaaggaagagtatgagtattcaacatttccgtgtcgcccttattcccttttttgcggcattttgccttcctgtttttgctcacccagaaacgctggtgaaagtaaaagatgctgaagatcagttgggtgcacgagtgggttacatcgaactggatctcaacagcggtaagatccttgagagttttcgccccgaagaacgttttccaatgatgagcacttttaaagttctgctatgtggcgcggtattatcccgtgttgacgccgggcaagagcaactcggtcgccgcatacactattctcagaatgacttggttgagtactcaccagtcacagaaaagcatcttacggatggcatgacagtaagagaattatgcagtgctgccataaccatgagtgataacactgcggccaacttacttctgacaacgatcggaggaccgaaggagctaaccgcttttttgcacaacatgggggatcatgtaactcgccttgatcgttgggaaccggagctgaatgaagccataccaaacgacgagcgtgacaccacgatgcctgcagcaatggcaacaacgttgcgcaaactattaactggcgaactacttactctagcttcccggcaacaattaatagactggatggaggcggataaagttgcaggaccacttctgcgctcggcccttccggctggctggtttattgctgataaatctggagccggtgagcgtgggtctcgcggtatcattgcagcactggggccagatggtaagccctcccgtatcgtagttatctacacgacggggagtcaggcaactatggatgaacgaaatagacagatcgctgagataggtgcctcactgattaagcattggtaactgtcagaccaagtttactcatatatactttagattgatttaaaacttcatttttaatttaaaaggatctaggtgaagatcctttttgataatctcatgaccaaaatcccttaacgtgagttttcgttccactgagcgtcagaccccgtagaaaagatcaaaggatcttcttgagatcctttttttctgcgcgtaatctgctgcttgcaaacaaaaaaaccaccgctaccagcggtggtttgtttgccggatcaagagctaccaactctttttccgaaggtaactggcttcagcagagcgcagataccaaatactgtccttctagtgtagccgtagttaggccaccacttcaagaactctgtagcaccgcctacatacctcgctctgctaatcctgttaccagtggctgctgccagtggcgataagtcgtgtcttaccgggttggactcaagacgatagttaccggataaggcgcagcggtcgggctgaacggggggttcgtgcacacagcccagcttggagcgaacgacctacaccgaactgagatacctacagcgtgagctatgagaaagcgccacgcttcccgaagggagaaaggcggacaggtatccggtaagcggcagggtcggaacaggagagcgcacgagggagcttccagggggaaacgcctggtatctttatagtcctgtcgggtttcgccacctctgacttgagcgtcgatttttgtgatgctcgtcaggggggcggagcctatggaaaaacgccagcaacgcggcctttttacggttcctggccttttgctggccttttgctcacatgttctttcctgcgttatcccctgattctgtggataaccgtattaccgcctttgagtgagctgataccgctcgccgcagccgaacgaccgagcgcagcgagtcagtgagcgaggaagcggaagagcgcctgatgcggtattttctccttacgcatctgtgcggtatttcacaccgcatatatggtgcactctcagtacaatctgctctgatgccgcatagttaagccagtatacactccgctatcgctacgtgactgggtcatggctgcgccccgacacccgccaacacccgctgacgcgccctgacgggcttgtctgctcccggcatccgcttacagacaagctgtgaccgtctccgggagctgcatgtgtcagaggttttcaccgtcatcaccgaaacgcgcgaggcagctgcggtaaagctcatcagcgtggtcgtgaagcgattcacagatgtctgcctgttcatccgcgtccagctcgttgagtttctccagaagcgttaatgtctggcttctgataaagcgggccatgttaagggcggttttttcctgtttggtcactgatgcctccgtgtaagggggatttctgttcatgggggtaatgataccgatgaaacgagagaggatgctcacgatacgggttactgatgatgaacatgcccggttactggaacgttgtgagggtaaacaactggcggtatggatgcggcgggaccagagaaaaatcactcagggtcaatgccagcgcttcgttaatacagatgtaggtgttccacagggtagccagcagcatcctgcgatgcagatccggaacataatggtgcagggcgctgacttccgcgtttccagactttacgaaacacggaaaccgaagaccattcatgttgttgctcaggtcgcagacgttttgcagcagcagtcgcttcacgttcgctcgcgtatcggtgattcattctgctaaccagtaaggcaaccccgccagcctagccgggtcctcaacgacaggagcacgatcatgcgcacccgtggccaggacccaacgctgcccgagatgcgccgcgtgcggctgctggagatggcggacgcgatggatatgttctgccaagggttggtttgcgcattcacagttctccgcaagaattgattggctccaattcttggagtggtgaatccgttagcgaggtgccgccggcttccattcaggtcgaggtggcccggctccatgcaccgcgacgcaacgcggggaggcagacaaggtatagggcggcgcctacaatccatgccaacccgttccatgtgctcgccgaggcggcataaatcgccgtgacgatcagcggtccagtgatcgaagttaggctggtaagagccgcgagcgatccttgaagctgtccctgatggtcgtcatctacctgcctggacagcatggcctgcaacgcgggcatcccgatgccgccggaagcgagaagaatcataatggggaaggccatccagcctcgcgtcgcgaacgccagcaagacgtagcccagcgcgtcggccgccatgccggcgataatggcctgcttctcgccgaaacgtttggtggcgggaccagtgacgaaggcttgagcgagggcgtgcaagattccgaataccgcaagcgacaggccgatcatcgtcgcgctccagcgaaagcggtcctcgccgaaaatgacccagagcgctgccggcacctgtcctacgagttgcatgataaagaagacagtcataagtgcggcgacgatagtcatgccccgcgcccaccggaaggagctgactgggttgaaggctctcaagggcatcggtcgagatcccggtgcctaatgagtgagctaacttacattaattgcgttgcgctcactgcccgctttccagtcgggaaacctgtcgtgccagctgcattaatgaatcggccaacgcgcggggagaggcggtttgcgtattgggcgccagggtggtttttcttttcaccagtgagacgggcaacagctgattgcccttcaccgcctggccctgagagagttgcagcaagcggtccacgctggtttgccccagcaggcgaaaatcctgtttgatggtggttaacggcgggatataacatgagctgtcttcggtatcgtcgtatcccactaccgagatatccgcaccaacgcgcagcccggactcggtaatggcgcgcattgcgcccagcgccatctgatcgttggcaaccagcatcgcagtgggaacgatgccctcattcagcatttgcatggtttgttgaaaaccggacatggcactccagtcgccttcccgttccgctatcggctgaatttgattgcgagtgagatatttatgccagccagccagacgcagacgcgccgagacagaacttaatgggcccgctaacagcgcgatttgctggtgacccaatgcgaccagatgctccacgcccagtcgcgtaccgtcttcatgggagaaaataatactgttgatgggtgtc

SEQ ID NO: 75 - protein, 2366 aa, Serratia entomophila; identical to SEQ ID NO: 19

SEQ ID NO: 76 - DNA, 12148 bp, Yersinia ruckeri
  primer_bind 5271..5317: note = primer NEW.pET11aLinYRAfp17tox_RV
  primer_bind 5297..5356: note = primer Yr_Tox_p11aC3CTS_FWlong
  primer_bind 11658..11709: note = primer YR_Afp17_p11a_stop_RVpubl
  primer_bind 11687..11714: note = primer pET11a_C3CTS-Stop_lin_FW
  source 1..12148: mol_type = other DNA
  CDS 5318..11689: note = Yersinia ruckeri Afp17, toxin
ttcttgaagacgaaagggcctcgtgatacgcctatttttataggttaatgtcatgataataatggtttcttagacgtcaggtggcacttttcggggaaatgtgcgcggaacccctatttgtttatttttctaaatacattcaaatatgtatccgctcatgagacaataaccctgataaatgcttcaataatattgaaaaaggaagagtatgagtattcaacatttccgtgtcgcccttattcccttttttgcggcattttgccttcctgtttttgctcacccagaaacgctggtgaaagtaaaagatgctgaagatcagttgggtgcacgagtgggttacatcgaactggatctcaacagcggtaagatccttgagagttttcgccccgaagaacgttttccaatgatgagcacttttaaagttctgctatgtggcgcggtattatcccgtgttgacgccgggcaagagcaactcggtcgccgcatacactattctcagaatgacttggttgagtactcaccagtcacagaaaagcatcttacggatggcatgacagtaagagaattatgcagtgctgccataaccatgagtgataacactgcggccaacttacttctgacaacgatcggaggaccgaaggagctaaccgcttttttgcacaacatgggggatcatgtaactcgccttgatcgttgggaaccggagctgaatgaagccataccaaacgacgagcgtgacaccacgatgcctgcagcaatggcaacaacgttgcgcaaactattaactggcgaactacttactctagcttcccggcaacaattaatagactggatggaggcggataaagttgcaggaccacttctgcgctcggcccttccggctggctggtttattgctgataaatctggagccggtgagcgtgggtctcgcggtatcattgcagcactggggccagatggtaagccctcccgtatcgtagttatctacacgacggggagtcaggcaactatggatgaacgaaatagacagatcgctgagataggtgcctcactgattaagcattggtaactgtcagaccaagtttactcatatatactttagattgatttaaaacttcatttttaatttaaaaggatctaggtgaagatcctttttgataatctcatgaccaaaatcccttaacgtgagttttcgttccactgagcgtcagaccccgtagaaaagatcaaaggatcttcttgagatcctttttttctgcgcgtaatctgctgcttgcaaacaaaaaaaccaccgctaccagcggtggtttgtttgccggatcaagagctaccaactctttttccgaaggtaactggcttcagcagagcgcagataccaaatactgtccttctagtgtagccgtagttaggccaccacttcaagaactctgtagcaccgcctacatacctcgctctgctaatcctgttaccagtggctgctgccagtggcgataagtcgtgtcttaccgggttggactcaagacgatagttaccggataaggcgcagcggtcgggctgaacggggggttcgtgcacacagcccagcttggagcgaacgacctacaccgaactgagatacctacagcgtgagctatgagaaagcgccacgcttcccgaagggagaaaggcggacaggtatccggtaagcggcagggtcggaacaggagagcgcacgagggagcttccagggggaaacgcctggtatctttatagtcctgtcgggtttcgccacctctgacttgagcgtcgatttttgtgatgctcgtcaggggggcggagcctatggaaaaacgccagcaacgcggcctttttacggttcctggccttttgctggccttttgctcacatgttctttcctgcgttatcccctgattctgtggataaccgtattaccgcctttgagtgagctgataccgctcgccgcagccgaacgaccgagcgcagcgagtcagtgagcgaggaagcggaagagcgcctgatgcggtattttctccttacgcatctgtgcggtatttcacaccgcatatatggtgcactctcagtacaatctgctctgatgccgcatagttaagccagtatacactccgctatcgctacgtgactgggtcatggctgcgccccgacacccgccaacacccgctgacgcgccctgacgggcttgtctgctcccggcatccgcttacagacaagctgtgaccgtctccgggagctgcatgtgtcagaggttttcaccgtcatcaccgaaacgcgcgaggcagctgcggtaaagctcatcagcgtggtcgtgaagcgattcacagatgtctgcctgttcatccgcgtccagctcgttgagtttctccagaagcgttaatgtctggcttctgataaagcgggccatgttaagggcggttttttcctgtttggtcactgatgcctccgtgtaagggggatttctgttcatgggggtaatgataccgatgaaacgagagaggatgctcacgatacgggttactgatgatgaacatgcccggttactggaacgttgtgagggtaaacaactggcggtatggatgcggcgggaccagagaaaaatcactcagggtcaatgccagcgcttcgttaatacagatgtaggtgttccacagggtagccagcagcatcctgcgatgcagatccggaacataatggtgcagggcgctgacttccgcgtttccagactttacgaaacacggaaaccgaagaccattcatgttgttgctcaggtcgcagacgttttgcagcagcagtcgcttcacgttcgctcgcgtatcggtgattcattctgctaaccagtaaggcaaccccgccagcctagccgggtcctcaacgacaggagcacgatcatgcgcacccgtggccaggacccaacgctgcccgagatgcgccgcgtgcggctgctggagatggcggacgcgatggatatgttctgccaagggttggtttgcgcattcacagttctccgcaagaattgattggctccaattcttggagtggtgaatccgttagcgaggtgccgccggcttccattcaggtcgaggtggcccggctccatgcaccgcgacgcaacgcggggaggcagacaaggtatagggcggcgcctacaatccatgccaacccgttccatgtgctcgccgaggcggcataaatcgccgtgacgatcagcggtccagtgatcgaagttaggctggtaagagccgcgagcgatccttgaagctgtccctgatggtcgtcatctacctgcctggacagcatggcctgcaacgcgggcatcccgatgccgccggaagcgagaagaatcataatggggaaggccatccagcctcgcgtcgcgaacgccagcaagacgtagcccagcgcgtcggccgccatgccggcgataatggcctgcttctcgccgaaacgtttggtggcgggaccagtgacgaaggcttgagcgagggcgtgcaagattccgaataccgcaagcgacaggccgatcatcgtcgcgctccagcgaaagcggtcctcgccgaaaatgacccagagcgctgccggcacctgtcctacgagttgcatgataaagaagacagtcataagtgcggcgacgatagtcatgccccgcgcccaccggaaggagctgactgggttgaaggctctcaagggcatcggtcgagatcccggtgcctaatgagtgagctaacttacattaattgcgttgcgctcactgcccgctttccagtcgggaaacctgtcgtgccagctgcattaatgaatcggccaacgcgcggggagaggcggtttgcgtattgggcgccagggtggtttttcttttcaccagtgagacgggcaacagctgattgcccttcaccgcctggccctgagagagttgcagcaagcggtccacgctggtttgccccagcaggcgaaaatcctgtttgatggtggttaacggcgggatataacatgagctgtcttcggtatcgtcgtatcccactaccgagatatccgcaccaacgcgcagcccggactcggtaatggcgcgcattgcgcccagcgccatctgatcgttggcaaccagcatcgcagtgggaacgatgccctcattcagcatttgcatggtttgttgaaaaccggacatggcactccagtcgccttcccgttccgctatcggctgaatttgattgcgagtgagatatttatgccagccagccagacgcagacgcgccgagacagaacttaatgggcccgctaacagcgcgatttgctggtgacccaatgcgaccagatgctccacgcccagtcgcgtaccgtcttcatgggagaaaataatactgttgatgggtgtctggtcagagacatcaagaaataacgccggaacattagtgcaggcagcttccacagcaatggcatcctggtcatccagcggatagttaatgatcagcccactgacgcgttgcgcgagaagattgtgcaccgccgctttacaggcttcgacgccgcttcgttctaccatcgacaccaccacgctggcacccagttgatcggcgcgagatttaatcgccgcgacaatttgcgacggcgcgtgcagggccagactggaggtggcaacgccaatcagcaacgactgtttgcccgccagttgttgtgccacgcggttgggaatgtaattcagctccgccatcgccgcttccactttttcccgcgttttcgcagaaacgtggctggcctggttcaccacgcgggaaacggtctgataagagacaccggcatactctgcgacatcgtataacgttactggtttcacattcaccaccctgaattgactctcttccgggcgctatcatgccataccgcgaaaggttttgcgccattcgatggtgtccgggatctcgacgctctcccttatgcgactcctgcattaggaagcagcccagtagtaggttgaggccgttgagcaccgccgccgcaaggaatggtgcatgcaaggagatggcgcccaacagtcccccggccacggggcctgccaccatacccacgccgaaacaagcgctcatgagcccgaagtggcgagcccgatcttccccatcggtgatgtcggcgatataggcgccagcaaccgcacctgtggcgccggtgatgccggccacgatgcgtccggcgtagaggatcgagatctcgatcccgcgaaattaatacgactcactataggggaattgtgagcggataacaattcccctctagaaataattttgtttaactttaagaaggagatatacatatgccttactttaataaatcgaagaaaaatgaaataaggccagaaaaaagtaaggaagaagttgggggggtattattcgatgatagcgcgatccacgaaaatatcgatcataacatggaacctcagaccggtgattcagtagccactttcccagataattccgatgaagtggttgggggcgatctggccgccctgcgggctcgcctacaagccactattggtgattacctgccagagttttacgagtttcaacagacgggtcgcaatatcctatatcccaaaccggtcgacatcaaagcattacaagcgcggctcaactcaatgccgataacggcatggatacaaccgttacagcaacaattggaacaagctggcaacgcttttctggatcggttcagactgttccggaaagagaaggactggcataacaacgccctggaatttgtcaaatttcggttggcggtgaaagaaacgggctgggatgagcagcaaacccgagattataacgaagcacttaagcatgccaaccgcctgagtggttatctttcaggaacgctggatctcattcaacacctcaatgacaatccggagcggcagacatcgtgggaggccgtgaggaaaacaagctacgatatgctcctcaatgaacttctcccggtagatgcggagaataatggcaaccaatataccgctaaaattcgtggaaatttgactaaaaatcatcctgacaacataaaatttaataccatcgtgaactcagtcacccgggatgaaaggatggccagtgaagcactgagtgcggagacgaaggggctgtcggcgagattattgagtggtattgcgctaaccagaaattctgcggaaaagatagataaaaaaagtgaaaccagtgggattacccgcgacattgttgcgctctgtcaggtcttgcagggtgttatcaaaaccattaagcgtagaggggaatatattcagcctctgacagactggcagcctagtgagcacaaattacctgggcagaaggaagaattaactaaagcagaaactgtaaaaagagaattggtgaaatcgcggaaagtgatgatgcagaaggtgcaaggagccaagaccattttgggggtgttgtctgataagacaaacaaaaatagacaccgtattacgcagacactcccttactccgctaaccctgatacaaataccgtcagccgtaaaacaaacgaagctgtttttcgggcagggataatgctgcttgataaaattcagcaaaccacatccggtattcataaagccagtctggcttcccgtccattacaacatgcagtaacacagtacagtgcgctggagcagatgtcatctggtatgccctccaacagaatactggatgcgaagctacgtagcgagtccggcagatggcaagaaaaagcagaaaaatcaaaaaagcaactgcaacatatactcagggaaataacggcgctggcagaagaacacttgaagcataaatttatgtcagcattgagagatgaattaaaacgtgcccctgagactctggcatcaaataacataatcagtaattttgatacacgggcaaaaatagttgttgagggtttagctagcattgaaataggtatgaatcagtctgtggtacgccttgccgggcatggtgaagctggaaggaaagatctggacgaacaagtagtggcatggttgcagcgtctggaacgcataaaaggtgagttaaaaaccgatattacacaggcaacagggcagtcgatcaacaatttttcccgccaaggtatgttggccagacgaatgggagaatggaacgaagcggagaagcaacgctatctggcggcgctttctacagaagatcgggcggtagccgaaatgcaatataacacattgttttttgaggtgatccagcactaccttcccttattatccaaagagactgatccacagggcgagaggctgcttcaacgattgcgcctcgaagtgagcaatgcggctgaaggcaccactgtctaccctgcaactatggccgaaatccttgccgggatgaaaagcaccgagcaggcaataagagactggtcaggaagaaaactgctcagggtggtctttctagccgcctgtttggagggggtaaagttgatgccgaaactggctgcactgccgctacgggtagcgattaaatttgttatcacgggggcgaaagtggcgtgggctacccacaaaggacagcaggggatacgcggtggtgagggtgatgtagatgatgagataggggaatatgcaaagcgaagtttcaaaactgcgagcgtcaaagtggtgctctcacttcccccagggctggcaacgatgctgggggttgcctcgattgcactggacgtttacgagggaggactaaaaggtgcggggggaaagatagcaaaaaatattgtgggggacgctccctggcgtgcgctgaatcaaggcagcaaaatagcggccgaagcttatactactgcatcgatgaatgccgcgctgaaagaagggggagccaatccggtgagccactcatcgacattgcagcaacaaatggatgccaagccgttctttgataatagtgaccaggatgccgatcaacctcgagtcagacgtaagcgggaaatgacggatgaaattatgctgtcagatggaagtagcaggagtgaagccaaagcgctcccagatgagaatgaactggataccgatcaatctaaaagcagacctgagagcgcgctagccgtcgagactctacagtcagaacattttgattttgatcgtggcatacgttatcaagacttctccgatgaacagaaaaaacaaacctatttacatggcattaaattcgtattgcttcaaatagaaaatgatggacattttgcacaaaatattagaaataatgcctatcttgccaggattggtgccaagcttgccgttcctgttgatatatatagatacaagcttaataacacctttcttcttcctgatgagatagattcaaaatctggtgttcttattcgtttggattcggaaataccttattactatgtcagtgaaggaaaagatcttttagaaaatatcgcatgggctatgccttacaatgctgctaatcgtggtcctttgaaatttagtctcgacccaggggaagtgactagtagtcacagtggagttgatatacttaataatataagatctgagaggttcaagtttgaaacatactttaattataatgctccagaggcgatgagtattgaaagtctttctgcacaactagctaatactatcgaggccgattataaatttaagaacacgagcccaacaaacaaaatattaatttccagagcgattgtaggtgctcacattcctgaccctggagtcagggcaacccaaggagaatatcatattgaattcgactctgatgaattggccccagcaaagtatttgagatcattcgcaagaccattttctaccttgagtggggaaatgcagttaatatccagctccattaagggggaaacgatacaagaaacagagctacatgtacatcaggctgaatatataggaagctgggttgacgccactgcaggggcaatcatatcgtttacgccggaagggtggtttctcaatactgcgcaatcagcagcggagattactgctgatttgaccgagggtaaagatcctgacccattagcggttgctggtttgcttgtagggatcattcctggaggtaaaattgcagctaaagtaggaaagttcactcgtattggcggtaagactgttaaatacggcttgatacttggaaataaatcggtcgatctggctatcgtggggaaaagcattaagacagccgtagacactggtgagccactcgccatttatcaggcgtttctggccagtggcatgagtgttaagaattcttatgacatagcaaaaaatatgtcctcagagctaaaaattagcaagaaaatagaagaaagtgctcgactgagaaaacttaaagcactccaaaaaaatacttataaatattctatgaattcgaaaatgccagtacgcaaatttagagttggacagacagacctgctcggaaaaatacataaaggggaaattaagatatccaggaataacggaacgacttgggagaagggaaatcaactccacttgttagcgtacaggctacaaaatgccggagggggacgtctgcttccggatgtatttagagataaaatagttattggggagtacagttttaaacgtgttaaatataatcaaaaaaaattaaatgaaatgatgcgtatcgctaagatgtataccccaacatcaaatagcacagagagaatagcaaaacttcaacaaaattataagactggaaaggaaatgagtcatgcacctcagtatgacacatataatgatttatctcttggtgaaaaacttgatttatttattaactccaatactgatgcgacaactagaggggttttagcaggaaagataaatgaatccattacgaatatcaatttatatgaaacagctaagggagttgatgcctggaaaacgtcagcaaataaagcaacggatgttgttcttgccccgcaaaatattttcttaaaagggagggctggcgagtgtctgccggagtccatattaatgggttgggctttacagagtgggcaagatacaaaattagcgaaaaaattaatgaatattcattcatcatcgaatattgcagccaatcctttatataaatcactcgttgaattgcattcagatggcaatgcgtctagatttggcgagtcagtgatatctgatattaatatgaaaatgttaagtggtgctgagtcaaaactgttcccaacggaaaactcttccgttagagttgatattcctgaacatactatgttgatatcgaaagtgaataaggatggtaaaataaaatatgtattctatgatcctaattatggcatggcttattttaataaatataaagaaatgatttcgttttttaagaaaaagatcaaggggtatgatactccaaagcgatcgactagtttccgtcagttagattactcacatctttccgatattaaaataaaaggaaaaaacttgaatgaaattatagatggtgaaatcccacaaattttcaggcaagaggatgtgaatttagagggtatcacacctcaagatggtatttataggatgcttggaactcatcaacaagaaaataatacatatataaaatctcaaaataacatttatcaagttgagtgggatcaaacgacgaatacgtggagagtgtttgactctgcaaataccaatcggtccaggataactgtaccaataaaaagagataccgatggggaatggttcaagtatacagagactggtcttaagggcggagggctttttgatgagataaaaaataactggcttcagcgtaaaagatttaaaaatttacaagactttaacgatatcgtagattttgaagaaaataaatggccttctgagccaataaataaagatattcatatgatatgggttggaacacgaaatatatctgagaaaaatattggtttatctctcgaaacagcgcgaaagaactctgattataacacgacaattatttatgacagtgggatcgcagggtatgaaagcgctaaggattttatgactgaaaaatttaaagatagtaaggttacgcttgttgatttcagaaagaaaagctactttcatcaactgcaacaagagccatcttttccttattatgaacaagctattcgagataaaaaatatgcgcaagccagcgatattttaagattattggttttaaaatatgaaggcggtatatataaagatattgatgatgtacaagtgaaggcatttggctctttagcctttccgaaggggattggtgttatgagggagtatgcaccagaggcgggtaaaaccacggcttttcctaatacaccaatagcggcgacaaaaaacaacccagtggttaataaaacattagaacttgctgtagaaaattatcatcgtggagagacaaacgtattgaagttagcagggccagatgtttttactgagtctctatatcaagagataccaggaatgcgtcctcaggttttaggcgcacaattagatcagttcgaattagcaaaacggcaagcgctaggaatgcgtctcgaaaaaccaaaaggctttgcggatgaaaaactgacattgcaagaaaaagcgaaaattagacagccttatgaagcgatacgtggactttctggatatgttgacaatggtgcagatcactcttgggtcactgatatgcccggtaacagcactcaaagctcaggcctgagctaaggtacccttgaggtgctgtttcagggaccaggaggtagtggatctgcttggagccatccacagttcgaaaaaggtggaggttctggcggtggatcaggtggaagtgcatggtctcaccctcagtttgagaaataaggatccggctgctaacaaagcccgaaaggaagctgagttggctgctgccaccgctgagcaataactagcataaccccttggggcctctaaacgggtcttgaggggttttttgctgaaaggaggaactatatccggatatcccgcaagaggcccggcagtaccggcataaccaagcctatgcctacagcatccagggtgacggtgccgaggatgacgatgagcgcattgttagatttcatacacggtgcctgactgcgttagcaatttaactgtgataaactaccgcattaaagcttatcgatgataagctgtcaaacatgagaa

SEQ ID NO: 77 - protein, 2123 aa, Yersinia ruckeri
MPYFNKSKKNEIRPEKSKEEVGGVLFDDSAIHENIDHNMEPQTGDSVATFPDNSDEVVGGDLAALRARLQATIGDYLPEFYEFQQTGRNILYPKPVDIKALQARLNSMPITAWIQPLQQQLEQAGNAFLDRFRLFRKEKDWHNNALEFVKFRLAVKETGWDEQQTRDYNEALKHANRLSGYLSGTLDLIQHLNDNPERQTSWEAVRKTSYDMLLNELLPVDAENNGNQYTAKIRGNLTKNHPDNIKFNTIVNSVTRDERMASEALSAETKGLSARLLSGIALTRNSAEKIDKKSETSGITRDIVALCQVLQGVIKTIKRRGEYIQPLTDWQPSEHKLPGQKEELTKAETVKRELVKSRKVMMQKVQGAKTILGVLSDKTNKNRHRITQTLPYSANPDTNTVSRKTNEAVFRAGIMLLDKIQQTTSGIHKASLASRPLQHAVTQYSALEQMSSGMPSNRILDAKLRSESGRWQEKAEKSKKQLQHILREITALAEEHLKHKFMSALRDELKRAPETLASNNIISNFDTRAKIVVEGLASIEIGMNQSVVRLAGHGEAGRKDLDEQVVAWLQRLERIKGELKTDITQATGQSINNFSRQGMLARRMGEWNEAEKQRYLAALSTEDRAVAEMQYNTLFFEVIQHYLPLLSKETDPQGERLLQRLRLEVSNAAEGTTVYPATMAEILAGMKSTEQAIRDWSGRKLLRVVFLAACLEGVKLMPKLAALPLRVAIKFVITGAKVAWATHKGQQGIRGGEGDVDDEIGEYAKRSFKTASVKVVLSLPPGLATMLGVASIALDVYEGGLKGAGGKIAKNIVGDAPWRALNQGSKIAAEAYTTASMNAALKEGGANPVSHSSTLQQQMDAKPFFDNSDQDADQPRVRRKREMTDEIMLSDGSSRSEAKALPDENELDTDQSKSRPESALAVETLQSEHFDFDRGIRYQDFSDEQKKQTYLHGIKFVLLQIENDGHFAQNIRNNAYLARIGAKLAVPVDIYRYKLNNTFLLPDEIDSKSGVLIRLDSEIPYYYVSEGKDLLENIAWAMPYNAANRGPLKFSLDPGEVTSSHSGVDILNNIRSERFKFETYFNYNAPEAMSIESLSAQLANTIEADYKFKNTSPTNKILISRAIVGAHIPDPGVRATQGEYHIEFDSDELAPAKYLRSFARPFSTLSGEMQLISSSIKGETIQETELHVHQAEYIGSWVDATAGAIISFTPEGWFLNTAQSAAEITADLTEGKDPDPLAVAGLLVGIIPGGKIAAKVGKFTRIGGKTVKYGLILGNKSVDLAIVGKSIKTAVDTGEPLAIYQAFLASGMSVKNSYDIAKNMSSELKISKKIEESARLRKLKALQKNTYKYSMNSKMPVRKFRVGQTDLLGKIHKGEIKISRNNGTTWEKGNQLHLLAYRLQNAGGGRLLPDVFRDKIVIGEYSFKRVKYNQKKLNEMMRIAKMYTPTSNSTERIAKLQQNYKTGKEMSHAPQYDTYNDLSLGEKLDLFINSNTDATTRGVLAGKINESITNINLYETAKGVDAWKTSANKATDVVLAPQNIFLKGRAGECLPESILMGWALQSGQDTKLAKKLMNIHSSSNIAANPLYKSLVELHSDGNASRFGESVISDINMKMLSGAESKLFPTENSSVRVDIPEHTMLISKVNKDGKIKYVFYDPNYGMAYFNKYKEMISFFKKKIKGYDTPKRSTSFRQLDYSHLSDIKIKGKNLNEIIDGEIPQIFRQEDVNLEGITPQDGIYRMLGTHQQENNTYIKSQNNIYQVEWDQTTNTWRVFDSANTNRSRITVPIKRDTDGEWFKYTETGLKGGGLFDEIKNNWLQRKRFKNLQDFNDIVDFEENKWPSEPINKDIHMIWVGTRNISEKNIGLSLETARKNSDYNTTIIYDSGIAGYESAKDFMTEKFKDSKVTLVDFRKKSYFHQLQQEPSFPYYEQAIRDKKYAQASDILRLLVLKYEGGIYKDIDDVQVKAFGSLAFPKGIGVMREYAPEAGKTTAFPNTPIAATKNNPVVNKTLELAVENYHRGETNVLKLAGPDVFTESLYQEIPGMRPQVLGAQLDQFELAKRQALGMRLEKPKGFADEKLTLQEKAKIRQPYEAIRGLSGYVDNGADHSWVTDMPGNSTQSSGLS

SEQ ID NO: 78 - DNA, 6820 bp, Photorhabdus luminescens
  primer_bind 876..932: note = primer NEWpET11aLinYRAfp17tox_RV
  primer_bind 913..971: note = primer Photopexin_OH-for-pET11a_FW
  primer_bind 1949..1993: note = primer Photopexin_OH-for-pET11a_RV
  primer_bind 1974..2001: note = primer pET11a_C3CTS-Stop_lin_FW
  source 1..6820: mol_type = other DNA
  CDS 933..1976: note = Photorhabdus luminescens Photopexin PluDJC_08520
tggtcagagacatcaagaaataacgccggaacattagtgcaggcagcttccacagcaatggcatcctggtcatccagcggatagttaatgatcagcccactgacgcgttgcgcgagaagattgtgcaccgccgctttacaggcttcgacgccgcttcgttctaccatcgacaccaccacgctggcacccagttgatcggcgcgagatttaatcgccgcgacaatttgcgacggcgcgtgcagggccagactggaggtggcaacgccaatcagcaacgactgtttgcccgccagttgttgtgccacgcggttgggaatgtaattcagctccgccatcgccgcttccactttttcccgcgttttcgcagaaacgtggctggcctggttcaccacgcgggaaacggtctgataagagacaccggcatactctgcgacatcgtataacgttactggtttcacattcaccaccctgaattgactctcttccgggcgctatcatgccataccgcgaaaggttttgcgccattcgatggtgtccgggatctcgacgctctcccttatgcgactcctgcattaggaagcagcccagtagtaggttgaggccgttgagcaccgccgccgcaaggaatggtgcatgcaaggagatggcgcccaacagtcccccggccacggggcctgccaccatacccacgccgaaacaagcgctcatgagcccgaagtggcgagcccgatcttccccatcggtgatgtcggcgatataggcgccagcaaccgcacctgtggcgccggtgatgccggccacgatgcgtccggcgtagaggatcgagatctcgatcccgcgaaattaatacgactcactataggggaattgtgagcggataacaattcccctctagaaataattttgtttaactttaagaaggagatatacatatgaatatatctagttatttcttcctaaatgaagaaaacattagatttaataatcaatgtttaaatacatacattggctacccccaacccatcagtaaagattggcccaacctgcttgccgggttccaaagatatattgacgatattattaatttaaatggttttttatattttttcaaaggttcactgtatcttaaatttgatatcgcgaaagcagaggtcgttgataggccaaatttcattgtggatggctggcctgggttagaaggaacagaatttgaaaatggaatagatgcagctatagaattgaccaccaacaccgtttgttttttcaaaggaaaatattgtgtagattacaccatcgattcacacacaattaagatgaatactatttcagaccggtggggaatgaccgggaaatatgcagcatttagtagcaatctggatgccattatttcatggccagatatcgatggaaattttatttattttttcaaaggggattcttttattcggttcgacccaaatttgaatgcacttgatgccgggccaatcatcatctccagcgataatgagggttggagaggattagccttcaaaaatattcaagcggcggtatcggtcgatactgatttattaggcagcaaccgagacaatagtggaggcaatagtaaagtctgtaatggaacatgtggtactaatgacacgggtaaatattgtttccagttacctcaaagtattagatttggtttgatagcctacgctaatacaaatatttcgcaaactgtaaaagtatatattgacgatcttctggtagatacattaaccggtaaagggcaaaataatttaatggcgactaaagcctacacatcaggtacaggcaaaatctgtattgagattgaaggggatggcaaaccatgtaagctacgttatttcgataatatatttgatggaaaaccgggaacagctattatcagcgctgaaaatggtaccaatagtcattacaatgatagcgtggtgttcttgaattggcctctgacataaggtacccttgaggtgctgtttcagggaccaggaggtagtggatctgcttggagccatccacagttcgaaaaaggtggaggttctggcggtggatcaggtggaagtgcatggtctcaccctcagtttgagaaataaggatccggctgctaacaaagcccgaaaggaagctgagttggctgctgccaccgctgagcaataactagcataaccccttggggcctctaaacgggtcttgaggggttttttgctgaaaggaggaactatatccggatatcccgcaagaggcccggcagtaccggcataaccaagcctatgcctacagcatccagggtgacggtgccgaggatgacgatgagcgcattgttagatttcatacacggtgcctgactgcgttagcaatttaactgtgataaactaccgcattaaagcttatcgatgataagctgtcaaacatgagaattcttgaagacgaaagggcctcgtgatacgcctatttttataggttaatgtcatgataataatggtttcttagacgtcaggtggcacttttcggggaaatgtgcgcggaacccctatttgtttatttttctaaatacattcaaatatgtatccgctcatgagacaataaccctgataaatgcttcaataatattgaaaaaggaagagtatgagtattcaacatttccgtgtcgcccttattcccttttttgcggcattttgccttcctgtttttgctcacccagaaacgctggtgaaagtaaaagatgctgaagatcagttgggtgcacgagtgggttacatcgaactggatctcaacagcggtaagatccttgagagttttcgccccgaagaacgttttccaatgatgagcacttttaaagttctgctatgtggcgcggtattatcccgtgttgacgccgggcaagagcaactcggtcgccgcatacactattctcagaatgacttggttgagtactcaccagtcacagaaaagcatcttacggatggcatgacagtaagagaattatgcagtgctgccataaccatgagtgataacactgcggccaacttacttctgacaacgatcggaggaccgaaggagctaaccgcttttttgcacaacatgggggatcatgtaactcgccttgatcgttgggaaccggagctgaatgaagccataccaaacgacgagcgtgacaccacgatgcctgcagcaatggcaacaacgttgcgcaaactattaactggcgaactacttactctagcttcccggcaacaattaatagactggatggaggcggataaagttgcaggaccacttctgcgctcggcccttccggctggctggtttattgctgataaatctggagccggtgagcgtgggtctcgcggtatcattgcagcactggggccagatggtaagccctcccgtatcgtagttatctacacgacggggagtcaggcaactatggatgaacgaaatagacagatcgctgagataggtgcctcactgattaagcattggtaactgtcagaccaagtttactcatatatactttagattgatttaaaacttcatttttaatttaaaaggatctaggtgaagatcctttttgataatctcatgaccaaaatcccttaacgtgagttttcgttccactgagcgtcagaccccgtagaaaagatcaaaggatcttcttgagatcctttttttctgcgcgtaatctgctgcttgcaaacaaaaaaaccaccgctaccagcggtggtttgtttgccggatcaagagctaccaactctttttccgaaggtaactggcttcagcagagcgcagataccaaatactgtccttctagtgtagccgtagttaggccaccacttcaagaactctgtagcaccgcctacatacctcgctctgctaatcctgttaccagtggctgctgccagtggcgataagtcgtgtcttaccgggttggactcaagacgatagttaccggataaggcgcagcggtcgggctgaacggggggttcgtgcacacagcccagcttggagcgaacgacctacaccgaactgagatacctacagcgtgagctatgagaaagcgccacgcttcccgaagggagaaaggcggacaggtatccggtaagcggcagggtcggaacaggagagcgcacgagggagcttccagggggaaacgcctggtatctttatagtcctgtcgggtttcgccacctctgacttgagcgtcgatttttgtgatgctcgtcaggggggcggagcctatggaaaaacgccagcaacgcggcctttttacggttcctggccttttgctggccttttgctcacatgttctttcctgcgttatcccctgattctgtggataaccgtattaccgcctttgagtgagctgataccgctcgccgcagccgaacgaccgagcgcagcgagtcagtgagcgaggaagcggaagagcgcctgatgcggtattttctccttacgcatctgtgcggtatttcacaccgcatatatggtgcactctcagtacaatctgctctgatgccgcatagttaagccagtatacactccgctatcgctacgtgactgggtcatggctgcgccccgacacccgccaacacccgctgacgcgccctgacgggcttgtctgctcccggcatccgcttacagacaagctgtgaccgtctccgggagctgcatgtgtcagaggttttcaccgtcatcaccgaaacgcgcgaggcagctgcggtaaagctcatcagcgtggtcgtgaagcgattcacagatgtctgcctgttcatccgcgtccagctcgttgagtttctccagaagcgttaatgtctggcttctgataaagcgggccatgttaagggcggttttttcctgtttggtcactgatgcctccgtgtaagggggatttctgttcatgggggtaatgataccgatgaaacgagagaggatgctcacgatacgggttactgatgatgaacatgcccggttactggaacgttgtgagggtaaacaactggcggtatggatgcggcgggaccagagaaaaatcactcagggtcaatgccagcgcttcgttaatacagatgtaggtgttccacagggtagccagcagcatcctgcgatgcagatccggaacataatggtgcagggcgctgacttccgcgtttccagactttacgaaacacggaaaccgaagaccattcatgttgttgctcaggtcgcagacgttttgcagcagcagtcgcttcacgttcgctcgcgtatcggtgattcattctgctaaccagtaaggcaaccccgccagcctagccgggtcctcaacgacaggagcacgatcatgcgcacccgtggccaggacccaacgctgcccgagatgcgccgcgtgcggctgctggagatggcggacgcgatggatatgttctgccaagggttggtttgcgcattcacagttctccgcaagaattgattggctccaattcttggagtggtgaatccgttagcgaggtgccgccggcttccattcaggtcgaggtggcccggctccatgcaccgcgacgcaacgcggggaggcagacaaggtatagggcggcgcctacaatccatgccaacccgttccatgtgctcgccgaggcggcataaatcgccgtgacgatcagcggtccagtgatcgaagttaggctggtaagagccgcgagcgatccttgaagctgtccctgatggtcgtcatctacctgcctggacagcatggcctgcaacgcgggcatcccgatgccgccggaagcgagaagaatcataatggggaaggccatccagcctcgcgtcgcgaacgccagcaagacgtagcccagcgcgtcggccgccatgccggcgataatggcctgcttctcgccgaaacgtttggtggcgggaccagtgacgaaggcttgagcgagggcgtgcaagattccgaataccgcaagcgacaggccgatcatcgtcgcgctccagcgaaagcggtcctcgccgaaaatgacccagagcgctgccggcacctgtcctacgagttgcatgataaagaagacagtcataagtgcggcgacgatagtcatgccccgcgcccaccggaaggagctgactgggttgaaggctctcaagggcatcggtcgagatcccggtgcctaatgagtgagctaacttacattaattgcgttgcgctcactgcccgctttccagtcgggaaacctgtcgtgccagctgcattaatgaatcggccaacgcgcggggagaggcggtttgcgtattgggcgccagggtggtttttcttttcaccagtgagacgggcaacagctgattgcccttcaccgcctggccctgagagagttgcagcaagcggtccacgctggtttgccccagcaggcgaaaatcctgtttgatggtggttaacggcgggatataacatgagctgtcttcggtatcgtcgtatcccactaccgagatatccgcaccaacgcgcagcccggactcggtaatggcgcgcattgcgcccagcgccatctgatcgttggcaaccagcatcgcagtgggaacgatgccctcattcagcatttgcatggtttgttgaaaaccggacatggcactccagtcgccttcccgttccgctatcggctgaatttgattgcgagtgagatatttatgccagccagccagacgcagacgcgccgagacagaacttaatgggcccgctaacagcgcgatttgctggtgacccaatgcgaccagatgctccacgcccagtcgcgtaccgtcttcatgggagaaaataatactgttgatgggtgtc

SEQ ID NO: 79 - protein, 347 aa, Photorhabdus luminescens
MNISSYFFLNEENIRFNNQCLNTYIGYPQPISKDWPNLLAGFQRYIDDIINLNGFLYFFKGSLYLKFDIAKAEVVDRPNFIVDGWPGLEGTEFENGIDAAIELTTNTVCFFKGKYCVDYTIDSHTIKMNTISDRWGMTGKYAAFSSNLDAIISWPDIDGNFIYFFKGDSFIRFDPNLNALDAGPIIISSDNEGWRGLAFKNIQAAVSVDTDLLGSNRDNSGGNSKVCNGTCGTNDTGKYCFQLPQSIRFGLIAYANTNISQTVKVYIDDLLVDTLTGKGQNNLMATKAYTSGTGKICIEIEGDGKPCKLRYFDNIFDGKPGTAIISAENGTNSHYNDSVVFLNWPLT

SEQ ID NO: 80 - DNA, 6040 bp, Serratia entomophila
  source 1..6040: mol_type = other DNA
  CDS 933..1082: note = Afp18-NT50
  CDS 1083..1196: note = LL37 codon optimized
tggtcagagacatcaagaaataacgccggaacattagtgcaggcagcttccacagcaatggcatcctggtcatccagcggatagttaatgatcagcccactgacgcgttgcgcgagaagattgtgcaccgccgctttacaggcttcgacgccgcttcgttctaccatcgacaccaccacgctggcacccagttgatcggcgcgagatttaatcgccgcgacaatttgcgacggcgcgtgcagggccagactggaggtggcaacgccaatcagcaacgactgtttgcccgccagttgttgtgccacgcggttgggaatgtaattcagctccgccatcgccgcttccactttttcccgcgttttcgcagaaacgtggctggcctggttcaccacgcgggaaacggtctgataagagacaccggcatactctgcgacatcgtataacgttactggtttcacattcaccaccctgaattgactctcttccgggcgctatcatgccataccgcgaaaggttttgcgccattcgatggtgtccgggatctcgacgctctcccttatgcgactcctgcattaggaagcagcccagtagtaggttgaggccgttgagcaccgccgccgcaaggaatggtgcatgcaaggagatggcgcccaacagtcccccggccacggggcctgccaccatacccacgccgaaacaagcgctcatgagcccgaagtggcgagcccgatcttccccatcggtgatgtcggcgatataggcgccagcaaccgcacctgtggcgccggtgatgccggccacgatgcgtccggcgtagaggatcgagatctcgatcccgcgaaattaatacgactcactataggggaattgtgagcggataacaattcccctctagaaataattttgtttaactttaagaaggagatatacatatgccttactccagtgagtcgaaggaaaaagaaacacactcaaaagaaaccgaaagagataatgctgacccagtatttcaacgggtcagccagggcggcgtgggtgtttcaccgcctgatgaggggggagacttgtcggccggaagtaacctgctgggtgacttctttcgtaagagcaaagagaagatcggcaaagagttcaagcgtatcgtgcagcgtattaaagattttctgcgtaacctggttccgcgtaccgagagctaaggtacccttgaggtgctgtttcagggaccaggaggtagtggatctgcttggagccatccacagttcgaaaaaggtggaggttctggcggtggatcaggtggaagtgcatggtctcaccctcagtttgagaaataaggatccggctgctaacaaagcccgaaaggaagctgagttggctgctgccaccgctgagcaataactagcataaccccttggggcctctaaacgggtcttgaggggttttttgctgaaaggaggaactatatccggatatcccgcaagaggcccggcagtaccggcataaccaagcctatgcctacagcatccagggtgacggtgccgaggatgacgatgagcgcattgttagatttcatacacggtgcctgactgcgttagcaatttaactgtgataaactaccgcattaaagcttatcgatgataagctgtcaaacatgagaattcttgaagacgaaagggcctcgtgatacgcctatttttataggttaatgtcatgataataatggtttcttagacgtcaggtggcacttttcggggaaatgtgcgcggaacccctatttgtttatttttctaaatacattcaaatatgtatccgctcatgagacaataaccctgataaatgcttcaataatattgaaaaaggaagagtatgagtattcaacatttccgtgtcgcccttattcccttttttgcggcattttgccttcctgtttttgctcacccagaaacgctggtgaaagtaaaagatgctgaagatcagttgggtgcacgagtgggttacatcgaactggatctcaacagcggtaagatccttgagagttttcgccccgaagaacgttttccaatgatgagcacttttaaagttctgctatgtggcgcggtattatcccgtgttgacgccgggcaagagcaactcggtcgccgcatacactattctcagaatgacttggttgagtactcaccagtcacagaaaagcatcttacggatggcatgacagtaagagaattatgcagtgctgccataaccatgagtgataacactgcggccaacttacttctgacaacgatcggaggaccgaaggagctaaccgcttttttgcacaacatgggggatcatgtaactcgccttgatcgttgggaaccggagctgaatgaagccataccaaacgacgagcgtgacaccacgatgcctgcagcaatggcaacaacgttgcgcaaactattaactggcgaactacttactctagcttcccggcaacaattaatagactggatggaggcggataaagttgcaggaccacttctgcgctcggcccttccggctggctggtttattgctgataaatctggagccggtgagcgtgggtctcgcggtatcattgcagcactggggccagatggtaagccctcccgtatcgtagttatctacacgacggggagtcaggcaactatggatgaacgaaatagacagatcgctgagataggtgcctcactgattaagcattggtaactgtcagaccaagtttactcatatatactttagattgatttaaaacttcatttttaatttaaaaggatctaggtgaagatcctttttgataatctcatgaccaaaatcccttaacgtgagttttcgttccactgagcgtcagaccccgtagaaaagatcaaaggatcttcttgagatcctttttttctgcgcgtaatctgctgcttgcaaacaaaaaaaccaccgctaccagcggtggtttgtttgccggatcaagagctaccaactctttttccgaaggtaactggcttcagcagagcgcagataccaaatactgtccttctagtgtagccgtagttaggccaccacttcaagaactctgtagcaccgcctacatacctcgctctgctaatcctgttaccagtggctgctgccagtggcgataagtcgtgtcttaccgggttggactcaagacgatagttaccggataaggcgcagcggtcgggctgaacggggggttcgtgcacacagcccagcttggagcgaacgacctacaccgaactgagatacctacagcgtgagctatgagaaagcgccacgcttcccgaagggagaaaggcggacaggtatccggtaagcggcagggtcggaacaggagagcgcacgagggagcttccagggggaaacgcctggtatctttatagtcctgtcgggtttcgccacctctgacttgagcgtcgatttttgtgatgctcgtcaggggggcggagcctatggaaaaacgccagcaacgcggcctttttacggttcctggccttttgctggccttttgctcacatgttctttcctgcgttatcccctgattctgtggataaccgtattaccgcctttgagtgagctgataccgctcgccgcagccgaacgaccgagcgcagcgagtcagtgagcgaggaagcggaagagcgcctgatgcggtattttctccttacgcatctgtgcggtatttcacaccgcatatatggtgcactctcagtacaatctgctctgatgccgcatagttaagccagtatacactccgctatcgctacgtgactgggtcatggctgcgccccgacacccgccaacacccgctgacgcgccctgacgggcttgtctgctcccggcatccgcttacagacaagctgtgaccgtctccgggagctgcatgtgtcagaggttttcaccgtcatcaccgaaacgcgcgaggcagctgcggtaaagctcatcagcgtggtcgtgaagcgattcacagatgtctgcctgttcatccgcgtccagctcgttgagtttctccagaagcgttaatgtctggcttctgataaagcgggccatgttaagggcggttttttcctgtttggtcactgatgcctccgtgtaagggggatttctgttcatgggggtaatgataccgatgaaacgagagaggatgctcacgatacgggttactgatgatgaacatgcccggttactggaacgttgtgagggtaaacaactggcggtatggatgcggcgggaccagagaaaaatcactcagggtcaatgccagcgcttcgttaatacagatgtaggtgttccacagggtagccagcagcatcctgcgatgcagatccggaacataatggtgcagggcgctgacttccgcgtttccagactttacgaaacacggaaaccgaagaccattcatgttgttgctcaggtcgcagacgttttgcagcagcagtcgcttcacgttcgctcgcgtatcggtgattcattctgctaaccagtaaggcaaccccgccagcctagccgggtcctcaacgacaggagcacgatcatgcgcacccgtggccaggacccaacgctgcccgagatgcgccgcgtgcggctgctggagatggcggacgcgatggatatgttctgccaagggttggtttgcgcattcacagttctccgcaagaattgattggctccaattcttggagtggtgaatccgttagcgaggtgccgccggcttccattcaggtcgaggtggcccggctccatgcaccgcgacgcaacgcggggaggcagacaaggtatagggcggcgcctacaatccatgccaacccgttccatgtgctcgccgaggcggcataaatcgccgtgacgatcagcggtccagtgatcgaagttaggctggtaagagccgcgagcgatccttgaagctgtccctgatggtcgtcatctacctgcctggacagcatggcctgcaacgcgggcatcccgatgccgccggaagcgagaagaatcataatggggaaggccatccagcctcgcgtcgcgaacgccagcaagacgtagcccagcgcgtcggccgccatgccggcgataatggcctgcttctcgccgaaacgtttggtggcgggaccagtgacgaaggcttgagcgagggcgtgcaagattccgaataccgcaagcgacaggccgatcatcgtcgcgctccagcgaaagcggtcctcgccgaaaatgacccagagcgctgccggcacctgtcctacgagttgcatgataaagaagacagtcataagtgcggcgacgatagtcatgccccgcgcccaccggaaggagctgactgggttgaaggctctcaagggcatcggtcgagatcccggtgcctaatgagtgagctaacttacattaattgcgttgcgctcactgcccgctttccagtcgggaaacctgtcgtgccagctgcattaatgaatcggccaacgcgcggggagaggcggtttgcgtattgggcgccagggtggtttttcttttcaccagtgagacgggcaacagctgattgcccttcaccgcctggccctgagagagttgcagcaagcggtccacgctggtttgccccagcaggcgaaaatcctgtttgatggtggttaacggcgggatataacatgagctgtcttcggtatcgtcgtatcccactaccgagatatccgcaccaacgcgcagcccggactcggtaatggcgcgcattgcgcccagcgccatctgatcgttggcaaccagcatcgcagtgggaacgatgccctcattcagcatttgcatggtttgttgaaaaccggacatggcactccagtcgccttcccgttccgctatcggctgaatttgattgcgagtgagatatttatgccagccagccagacgcagacgcgccgagacagaacttaatgggcccgctaacagcgcgatttgctggtgacccaatgcgaccagatgctccacgcccagtcgcgtaccgtcttcatgggagaaaataatactgttgatgggtgtc

SEQ ID NO: 81 - protein, 50 aa, Serratia entomophila
MPYSSESKEKETHSKETERDNADPVFQRVSQGGVGVSPPDEGGDLSAGSN

SEQ ID NO: 82 - protein, 37 aa, Serratia entomophila
LLGDFFRKSKEKIGKEFKRIVQRIKDFLRNLVPRTES

SEQ ID NO: 83 - DNA, 5980 bp, Serratia entomophila
  source 1..5980: mol_type = other DNA
  CDS 933..1022: note = Afp18-NT30
  CDS 1023..1136: note = LL37 codon optimized
tggtcagagacatcaagaaataacgccggaacattagtgcaggcagcttccacagcaatggcatcctggtcatccagcggatagttaatgatcagcccactgacgcgttgcgcgagaagattgtgcaccgccgctttacaggcttcgacgccgcttcgttctaccatcgacaccaccacgctggcacccagttgatcggcgcgagatttaatcgccgcgacaatttgcgacggcgcgtgcagggccagactggaggtggcaacgccaatcagcaacgactgtttgcccgccagttgttgtgccacgcggttgggaatgtaattcagctccgccatcgccgcttccactttttcccgcgttttcgcagaaacgtggctggcctggttcaccacgcgggaaacggtctgataagagacaccggcatactctgcgacatcgtataacgttactggtttcacattcaccaccctgaattgactctcttccgggcgctatcatgccataccgcgaaaggttttgcgccattcgatggtgtccgggatctcgacgctctcccttatgcgactcctgcattaggaagcagcccagtagtaggttgaggccgttgagcaccgccgccgcaaggaatggtgcatgcaaggagatggcgcccaacagtcccccggccacggggcctgccaccatacccacgccgaaacaagcgctcatgagcccgaagtggcgagcccgatcttccccatcggtgatgtcggcgatataggcgccagcaaccgcacctgtggcgccggtgatgccggccacgatgcgtccggcgtagaggatcgagatctcgatcccgcgaaattaatacgactcactataggggaattgtgagcggataacaattcccctctagaaataattttgtttaactttaagaaggagatatacatatgccttactccagtgagtcgaaggaaaaagaaacacactcaaaagaaaccgaaagagataatgctgacccagtatttcaacgggtcagcctgctgggtgacttctttcgtaagagcaaagagaagatcggcaaagagttcaagcgtatcgtgcagcgtattaaagattttctgcgtaacctggttccgcgtaccgagagctaaggtacccttgaggtgctgtttcagggaccaggaggtagtggatctgcttggagccatccacagttcgaaaaaggtggaggttctggcggtggatcaggtggaagtgcatggtctcaccctcagtttgagaaataaggatccggctgctaacaaagcccgaaaggaagctgagttggctgctgccaccgctgagcaataactagcataaccccttggggcctctaaacgggtcttgaggggttttttgctgaaaggaggaactatatccggatatcccgcaagaggcccggcagtaccggcataaccaagcctatgcctacagcatccagggtgacggtgccgaggatgacgatgagcgcattgttagatttcatacacggtgcctgactgcgttagcaatttaactgtgataaactaccgcattaaagcttatcgatgataagctgtcaaacatgagaattcttgaagacgaaagggcctcgtgatacgcctatttttataggttaatgtcatgataataatggtttcttagacgtcaggtggcacttttcggggaaatgtgcgcggaacccctatttgtttatttttctaaatacattcaaatatgtatccgctcatgagacaataaccctgataaatgcttcaataatattgaaaaaggaagagtatgagtattcaacatttccgtgtcgcccttattcccttttttgcggcattttgccttcctgtttttgctcacccagaaacgctggtgaaagtaaaagatgctgaagatcagttgggtgcacgagtgggttacatcgaactggatctcaacagcggtaagatccttgagagttttcgccccgaagaacgttttccaatgatgagcacttttaaagttctgctatgtggcgcggtattatcccgtgttgacgccgggcaagagcaactcggtcgccgcatacactattctcagaatgacttggttgagtactcaccagtcacagaaaagcatcttacggatggcatgacagtaagagaattatgcagtgctgccataaccatgagtgataacactgcggccaacttacttctgacaacgatcggaggaccgaaggagctaaccgcttttttgcacaacatgggggatcatgtaactcgccttgatcgttgggaaccggagctgaatgaagccataccaaacgacgagcgtgacaccacgatgcctgcagcaatggcaacaacgttgcgcaaactattaactggcgaactacttactctagcttcccggcaacaattaatagactggatggaggcggataaagttgcaggaccacttctgcgctcggcccttccggctggctggtttattgctgataaatctggagccggtgagcgtgggtctcgcggtatcattgcagcactggggccagatggtaagccctcccgtatcgtagttatctacacgacggggagtcaggcaactatggatgaacgaaatagacagatcgctgagataggtgcctcactgattaagcattggtaactgtcagaccaagtttactcatatatactttagattgatttaaaacttcatttttaatttaaaaggatctaggtgaagatcctttttgataatctcatgaccaaaatcccttaacgtgagttttcgttccactgagcgtcagaccccgtagaaaagatcaaaggatcttcttgagatcctttttttctgcgcgtaatctgctgcttgcaaacaaaaaaaccaccgctaccagcggtggtttgtttgccggatcaagagctaccaactctttttccgaaggtaactggcttcagcagagcgcagataccaaatactgtccttctagtgtagccgtagttaggccaccacttcaagaactctgtagcaccgcctacatacctcgctctgctaatcctgttaccagtggctgctgccagtggcgataagtcgtgtcttaccgggttggactcaagacgatagttaccggataaggcgcagcggtcgggctgaacggggggttcgtgcacacagcccagcttggagcgaacgacctacaccgaactgagatacctacagcgtgagctatgagaaagcgccacgcttcccgaagggagaaaggcggacaggtatccggtaagcggcagggtcggaacaggagagcgcacgagggagcttccagggggaaacgcctggtatctttatagtcctgtcgggtttcgccacctctgacttgagcgtcgatttttgtgatgctcgtcaggggggcggagcctatggaaaaacgccagcaacgcggcctttttacggttcctggccttttgctggccttttgctcacatgttctttcctgcgttatcccctgattctgtggataaccgtattaccgcctttgagtgagctgataccgctcgccgcagccgaacgaccgagcgcagcgagtcagtgagcgaggaagcggaagagcgcctgatgcggtattttctccttacgcatctgtgcggtatttcacaccgcatatatggtgcactctcagtacaatctgctctgatgccgcatagttaagccagtatacactccgctatcgctacgtgactgggtcatggctgcgccccgacacccgccaacacccgctgacgcgccctgacgggcttgtctgctcccggcatccgcttacagacaagctgtgaccgtctccgggagctgcatgtgtcagaggttttcaccgtcatcaccgaaacgcgcgaggcagctgcggtaaagctcatcagcgtggtcgtgaagcgattcacagatgtctgcctgttcatccgcgtccagctcgttgagtttctccagaagcgttaatgtctggcttctgataaagcgggccatgttaagggcggttttttcctgtttggtcactgatgcctccgtgtaagggggatttctgttcatgggggtaatgataccgatgaaacgagagaggatgctcacgatacgggttactgatgatgaacatgcccggttactggaacgttgtgagggtaaacaactggcggtatggatgcggcgggaccagagaaaaatcactcagggtcaatgccagcgcttcgttaatacagatgtaggtgttccacagggtagccagcagcatcctgcgatgcagatccggaacataatggtgcagggcgctgacttccgcgtttccagactttacgaaacacggaaaccgaagaccattcatgttgttgctcaggtcgcagacgttttgcagcagcagtcgcttcacgttcgctcgcgtatcggtgattcattctgctaaccagtaaggcaaccccgccagcctagccgggtcctcaacgacaggagcacgatcatgcgcacccgtggccaggacccaacgctgcccgagatgcgccgcgtgcggctgctggagatggcggacgcgatggatatgttctgccaagggttggtttgcgcattcacagttctccgcaagaattgattggctccaattcttggagtggtgaatccgttagcgaggtgccgccggcttccattcaggtcgaggtggcccggctccatgcaccgcgacgcaacgcggggaggcagacaaggtatagggcggcgcctacaatccatgccaacccgttccatgtgctcgccgaggcggcataaatcgccgtgacgatcagcggtccagtgatcgaagttaggctggtaagagccgcgagcgatccttgaagctgtccctgatggtcgtcatctacctgcctggacagcatggcctgcaacgcgggcatcccgatgccgccggaagcgagaagaatcataatggggaaggccatccagcctcgcgtcgcgaacgccagcaagacgtagcccagcgcgtcggccgccatgccggcgataatggcctgcttctcgccgaaacgtttggtggcgggaccagtgacgaaggcttgagcgagggcgtgcaagattccgaataccgcaagcgacaggccgatcatcgtcgcgctccagcgaaagcggtcctcgccgaaaatgacccagagcgctgccggcacctgtcctacgagttgcatgataaagaagacagtcataagtgcggcgacgatagtcatgccccgcgcccaccggaaggagctgactgggttgaaggctctcaagggcatcggtcgagatcccggtgcctaatgagtgagctaacttacattaattgcgttgcgctcactgcccgctttccagtcgggaaacctgtcgtgccagctgcattaatgaatcggccaacgcgcggggagaggcggtttgcgtattgggcgccagggtggtttttcttttcaccagtgagacgggcaacagctgattgcccttcaccgcctggccctgagagagttgcagcaagcggtccacgctggtttgccccagcaggcgaaaatcctgtttgatggtggttaacggcgggatataacatgagctgtcttcggtatcgtcgtatcccactaccgagatatccgcaccaacgcgcagcccggactcggtaatggcgcgcattgcgcccagcgccatctgatcgttggcaaccagcatcgcagtgggaacgatgccctcattcagcatttgcatggtttgttgaaaaccggacatggcactccagtcgccttcccgttccgctatcggctgaatttgattgcgagtgagatatttatgccagccagccagacgcagacgcgccgagacagaacttaatgggcccgctaacagcgcgatttgctggtgacccaatgcgaccagatgctccacgcccagtcgcgtaccgtcttcatgggagaaaataatactgttgatgggtgtc

SEQ ID NO: 84 - protein, 30 aa, Serratia entomophila
MPYSSESKEKETHSKETERDNADPVFQRVS

SEQ ID NO: 85 - protein, 37 aa, Serratia entomophila; identical to SEQ ID NO: 82

SEQ ID NO: 86 - DNA, 5950 bp, Serratia entomophila
  source 1..5950: mol_type = other DNA
  CDS 933..992: note = Afp18-NT20
  CDS 993..1106: note = LL37 codon optimized
tggtcagagacatcaagaaataacgccggaacattagtgcaggcagcttccacagcaatggcatcctggtcatccagcggatagttaatgatcagcccactgacgcgttgcgcgagaagattgtgcaccgccgctttacaggcttcgacgccgcttcgttctaccatcgacaccaccacgctggcacccagttgatcggcgcgagatttaatcgccgcgacaatttgcgacggcgcgtgcagggccagactggaggtggcaacgccaatcagcaacgactgtttgcccgccagttgttgtgccacgcggttgggaatgtaattcagctccgccatcgccgcttccactttttcccgcgttttcgcagaaacgtggctggcctggttcaccacgcgggaaacggtctgataagagacaccggcatactctgcgacatcgtataacgttactggtttcacattcaccaccctgaattgactctcttccgggcgctatcatgccataccgcgaaaggttttgcgccattcgatggtgtccgggatctcgacgctctcccttatgcgactcctgcattaggaagcagcccagtagtaggttgaggccgttgagcaccgccgccgcaaggaatggtgcatgcaaggagatggcgcccaacagtcccccggccacggggcctgccaccatacccacgccgaaacaagcgctcatgagcccgaagtggcgagcccgatcttccccatcggtgatgtcggcgatataggcgccagcaaccgcacctgtggcgccggtgatgccggccacgatgcgtccggcgtagaggatcgagatctcgatcccgcgaaattaatacgactcactataggggaattgtgagcggataacaattcccctctagaaataattttgtttaactttaagaaggagatatacatatgccttactccagtgagtcgaaggaaaaagaaacacactcaaaagaaaccgaaagagatctgctgggtgacttctttcgtaagagcaaagagaagatcggcaaagagttcaagcgtatcgtgcagcgtattaaagattttctgcgtaacctggttccgcgtaccgagagctaaggtacccttgaggtgctgtttcagggaccaggaggtagtggatctgcttggagccatccacagttcgaaaaaggtggaggttctggcggtggatcaggtggaagtgcatggtctcaccctcagtttgagaaataaggatccggctgctaacaaagcccgaaaggaagctgagttggctgctgccaccgctgagcaataactagcataaccccttggggcctctaaacgggtcttgaggggttttttgctgaaaggaggaactatatccggatatcccgcaagaggcccggcagtaccggcataaccaagcctatgcctacagcatccagggtgacggtgccgaggatgacgatgagcgcattgttagatttcatacacggtgcctgactgcgttagcaatttaactgtgataaactaccgcattaaagcttatcgatgataagctgtcaaacatgagaattcttgaagacgaaagggcctcgtgatacgcctatttttataggttaatgtcatgataataatggtttcttagacgtcaggtggcacttttcggggaaatgtgcgcggaacccctatttgtttatttttctaaatacattcaaatatgtatccgctcatgagacaataaccctgataaatgcttcaataatattgaaaaaggaagagtatgagtattcaacatttccgtgtcgcccttattcccttttttgcggcattttgccttcctgtttttgctcacccagaaacgctggtgaaagtaaaagatgctgaagatcagttgggtgcacgagtgggttacatcgaactggatctcaacagcggtaagatccttgagagttttcgccccgaagaacgttttccaatgatgagcacttttaaagttctgctatgtggcgcggtattatcccgtgttgacgccgggcaagagcaactcggtcgccgcatacactattctcagaatgacttggttgagtactcaccagtcacagaaaagcatcttacggatggcatgacagtaagagaattatgcagtgctgccataaccatgagtgataacactgcggccaacttacttctgacaacgatcggaggaccgaaggagctaaccgcttttttgcacaacatgggggatcatgtaactcgccttgatcgttgggaaccggagctgaatgaagccataccaaacgacgagcgtgacaccacgatgcctgcagcaatggcaacaacgttgcgcaaactattaactggcgaactacttactctagcttcccggcaacaattaatagactggatggaggcggataaagttgcaggaccacttctgcgctcggcccttccggctggctggtttattgctgataaatctggagccggtgagcgtgggtctcgcggtatcattgcagcactggggccagatggtaagccctcccgtatcgtagttatctacacgacggggagtcaggcaactatggatgaacgaaatagacagatcgctgagataggtgcctcactgattaagcattggtaactgtcagaccaagtttactcatatatactttagattgatttaaaacttcatttttaatttaaaaggatctaggtgaagatcctttttgataatctcatgaccaaaatcccttaacgtgagttttcgttccactgagcgtcagaccccgtagaaaagatcaaaggatcttcttgagatcctttttttctgcgcgtaatctgctgcttgcaaacaaaaaaaccaccgctaccagcggtggtttgtttgccggatcaagagctaccaactctttttccgaaggtaactggcttcagcagagcgcagataccaaatactgtccttctagtgtagccgtagttaggccaccacttcaagaactctgtagcaccgcctacatacctcgctctgctaatcctgttaccagtggctgctgccagtggcgataagtcgtgtcttaccgggttggactcaagacgatagttaccggataaggcgcagcggtcgggctgaacggggggttcgtgcacacagcccagcttggagcgaacgacctacaccgaactgagatacctacagcgtgagctatgagaaagcgccacgcttcccgaagggagaaaggcggacaggtatccggtaagcggcagggtcggaacaggagagcgcacgagggagcttccagggggaaacgcctggtatctttatagtcctgtcgggtttcgccacctctgacttgagcgtcgatttttgtgatgctcgtcaggggggcggagcctatggaaaaacgccagcaacgcggcctttttacggttcctggccttttgctggccttttgctcacatgttctttcctgcgttatcccctgattctgtggataaccgtattaccgcctttgagtgagctgataccgctcgccgcagccgaacgaccgagcgcagcgagtcagtgagcgaggaagcggaagagcgcctgatgcggtattttctccttacgcatctgtgcggtatttcacaccgcatatatggtgcactctcagtacaatctgctctgatgccgcatagttaagccagtatacactccgctatcgctacgtgactgggtcatggctgcgccccgacacccgccaacacccgctgacgcgccctgacgggcttgtctgctcccggcatccgcttacagacaagctgtgaccgtctccgggagctgcatgtgtcagaggttttcaccgtcatcaccgaaacgcgcgaggcagctgcggtaaagctcatcagcgtggtcgtgaagcgattcacagatgtctgcctgttcatccgcgtccagctcgttgagtttctccagaagcgttaatgtctggcttctgataaagcgggccatgttaagggcggttttttcctgtttggtcactgatgcctccgtgtaagggggatttctgttcatgggggtaatgataccgatgaaacgagagaggatgctcacgatacgggttactgatgatgaacatgcccggttactggaacgttgtgagggtaaacaactggcggtatggatgcggcgggaccagagaaaaatcactcagggtcaatgccagcgcttcgttaatacagatgtaggtgttccacagggtagccagcagcatcctgcgatgcagatccggaacataatggtgcagggcgctgacttccgcgtttccagactttacgaaacacggaaaccgaagaccattcatgttgttgctcaggtcgcagacgttttgcagcagcagtcgcttcacgttcgctcgcgtatcggtgattcattctgctaaccagtaaggcaaccccgccagcctagccgggtcctcaacgacaggagcacgatcatgcgcacccgtggccaggacccaacgctgcccgagatgcgccgcgtgcggctgctggagatggcggacgcgatggatatgttctgccaagggttggtttgcgcattcacagttctccgcaagaattgattggctccaattcttggagtggtgaatccgttagcgaggtgccgccggcttccattcaggtcgaggtggcccggctccatgcaccgcgacgcaacgcggggaggcagacaaggtatagggcggcgcctacaatccatgccaacccgttccatgtgctcgccgaggcggcataaatcgccgtgacgatcagcggtccagtgatcgaagttaggctggtaagagccgcgagcgatccttgaagctgtccctgatggtcgtcatctacctgcctggacagcatggcctgcaacgcgggcatcccgatgccgccggaagcgagaagaatcataatggggaaggccatccagcctcgcgtcgcgaacgccagcaagacgtagcccagcgcgtcggccgccatgccggcgataatggcctgcttctcgccgaaacgtttggtggcgggaccagtgacgaaggcttgagcgagggcgtgcaagattccgaataccgcaagcgacaggccgatcatcgtcgcgctccagcgaaagcggtcctcgccgaaaatgacccagagcgctgccggcacctgtcctacgagttgcatgataaagaagacagtcataagtgcggcgacgatagtcatgccccgcgcccaccggaaggagctgactgggttgaaggctctcaagggcatcggtcgagatcccggtgcctaatgagtgagctaacttacattaattgcgttgcgctcactgcccgctttccagtcgggaaacctgtcgtgccagctgcattaatgaatcggccaacgcgcggggagaggcggtttgcgtattgggcgccagggtggtttttcttttcaccagtgagacgggcaacagctgattgcccttcaccgcctggccctgagagagttgcagcaagcggtccacgctggtttgccccagcaggcgaaaatcctgtttgatggtggttaacggcgggatataacatgagctgtcttcggtatcgtcgtatcccactaccgagatatccgcaccaacgcgcagcccggactcggtaatggcgcgcattgcgcccagcgccatctgatcgttggcaaccagcatcgcagtgggaacgatgccctcattcagcatttgcatggtttgttgaaaaccggacatggcactccagtcgccttcccgttccgctatcggctgaatttgattgcgagtgagatatttatgccagccagccagacgcagacgcgccgagacagaacttaatgggcccgctaacagcgcgatttgctggtgacccaatgcgaccagatgctccacgcccagtcgcgtaccgtcttcatgggagaaaataatactgttgatgggtgtc

SEQ ID NO: 87 - protein, 20 aa, Serratia entomophila
MPYSSESKEKETHSKETERD

SEQ ID NO: 88 - protein, 37 aa, Serratia entomophila; identical to SEQ ID NO: 82

SEQ ID NO: 89 - DNA, 5923 bp, Serratia entomophila
  source 1..5923: mol_type = other DNA
  CDS 933..965: note = Afp18-NT11
  CDS 966..1079: note = LL37 codon optimized
tggtcagagacatcaagaaataacgccggaacattagtgcaggcagcttccacagcaatggcatcctggtcatccagcggatagttaatgatcagcccactgacgcgttgcgcgagaagattgtgcaccgccgctttacaggcttcgacgccgcttcgttctaccatcgacaccaccacgctggcacccagttgatcggcgcgagatttaatcgccgcgacaatttgcgacggcgcgtgcagggccagactggaggtggcaacgccaatcagcaacgactgtttgcccgccagttgttgtgccacgcggttgggaatgtaattcagctccgccatcgccgcttccactttttcccgcgttttcgcagaaacgtggctggcctggttcaccacgcgggaaacggtctgataagagacaccggcatactctgcgacatcgtataacgttactggtttcacattcaccaccctgaattgactctcttccgggcgctatcatgccataccgcgaaaggttttgcgccattcgatggtgtccgggatctcgacgctctcccttatgcgactcctgcattaggaagcagcccagtagtaggttgaggccgttgagcaccgccgccgcaaggaatggtgcatgcaaggagatggcgcccaacagtcccccggccacggggcctgccaccatacccacgccgaaacaagcgctcatgagcccgaagtggcgagcccgatcttccccatcggtgatgtcggcgatataggcgccagcaaccgcacctgtggcgccggtgatgccggccacgatgcgtccggcgtagaggatcgagatctcgatcccgcgaaattaatacgactcactataggggaattgtgagcggataacaattcccctctagaaataattttgtttaactttaagaaggagatatacatatgccttactccagtgagtcgaaggaaaaagaactgctgggtgacttctttcgtaagagcaaagagaagatcggcaaagagttcaagcgtatcgtgcagcgtattaaagattttctgcgtaacctggttccgcgtaccgagagctaaggtacccttgaggtgctgtttcagggaccaggaggtagtggatctgcttggagccatccacagttcgaaaaaggtggaggttctggcggtggatcaggtggaagtgcatggtctcaccctcagtttgagaaataaggatccggctgctaacaaagcccgaaaggaagctgagttggctgctgccaccgctgagcaataactagcataaccccttggggcctctaaacgggtcttgaggggttttttgctgaaaggaggaactatatccggatatcccgcaagaggcccggcagtaccggcataaccaagcctatgcctacagcatccagggtgacggtgccgaggatgacgatgagcgcattgttagatttcatacacggtgcctgactgcgttagcaatttaactgtgataaactaccgcattaaagcttatcgatgataagctgtcaaacatgagaattcttgaagacgaaagggcctcgtgatacgcctatttttataggttaatgtcatgataataatggtttcttagacgtcaggtggcacttttcggggaaatgtgcgcggaacccctatttgtttatttttctaaatacattcaaatatgtatccgctcatgagacaataaccctgataaatgcttcaataatattgaaaaaggaagagtatgagtattcaacatttccgtgtcgcccttattcccttttttgcggcattttgccttcctgtttttgctcacccagaaacgctggtgaaagtaaaagatgctgaagatcagttgggtgcacgagtgggttacatcgaactggatctcaacagcggtaagatccttgagagttttcgccccgaagaacgttttccaatgatgagcacttttaaagttctgctatgtggcgcggtattatcccgtgttgacgccgggcaagagcaactcggtcgccgcatacactattctcagaatgacttggttgagtactcaccagtcacagaaaagcatcttacggatggcatgacagtaagagaattatgcagtgctgccataaccatgagtgataacactgcggccaacttacttctgacaacgatcggaggaccgaaggagctaaccgcttttttgcacaacatgggggatcatgtaactcgccttgatcgttgggaaccggagctgaatgaagccataccaaacgacgagcgtgacaccacgatgcctgcagcaatggcaacaacgttgcgcaaactattaactggcgaactacttactctagcttcccggcaacaattaatagactggatggaggcggataaagttgcaggaccacttctgcgctcggcccttccggctggctggtttattgctgataaatctggagccggtgagcgtgggtctcgcggtatcattgcagcactggggccagatggtaagccctcccgtatcgtagttatctacacgacggggagtcaggcaactatggatgaacgaaatagacagatcgctgagataggtgcctcactgattaagcattggtaactgtcagaccaagtttactcatatatactttagattgatttaaaacttcatttttaatttaaaaggatctaggtgaagatcctttttgataatctcatgaccaaaatcccttaacgtgagttttcgttccactgagcgtcagaccccgtagaaaagatcaaaggatcttcttgagatcctttttttctgcgcgtaatctgctgcttgcaaacaaaaaaaccaccgctaccagcggtggtttgtttgccggatcaagagctaccaactctttttccgaaggtaactggcttcagcagagcgcagataccaaatactgtccttctagtgtagccgtagttaggccaccacttcaagaactctgtagcaccgcctacatacctcgctctgctaatcctgttaccagtggctgctgccagtggcgataagtcgtgtcttaccgggttggactcaagacgatagttaccggataaggcgcagcggtcgggctgaacggggggttcgtgcacacagcccagcttggagcgaacgacctacaccgaactgagatacctacagcgtgagctatgagaaagcgccacgcttcccgaagggagaaaggcggacaggtatccggtaagcggcagggtcggaacaggagagcgcacgagggagcttccagggggaaacgcctggtatctttatagtcctgtcgggtttcgccacctctgacttgagcgtcgatttttgtgatgctcgtcaggggggcggagcctatggaaaaacgccagcaacgcggcctttttacggttcctggccttttgctggccttttgctcacatgttctttcctgcgttatcccctgattctgtggataaccgtattaccgcctttgagtgagctgataccgctcgccgcagccgaacgaccgagcgcagcgagtcagtgagcgaggaagcggaagagcgcctgatgcggtattttctccttacgcatctgtgcggtatttcacaccgcatatatggtgcactctcagtacaatctgctctgatgccgcatagttaagccagtatacactccgctatcgctacgtgactgggtcatggctgcgccccgacacccgccaacacccgctgacgcgccctgacgggcttgtctgctcccggcatccgcttacagacaagctgtgaccgtctccgggagctgcatgtgtcagaggttttcaccgtcatcaccgaaacgcgcgaggcagctgcggtaaagctcatcagcgtggtcgtgaagcgattcacagatgtctgcctgttcatccgcgtccagctcgttgagtttctccagaagcgttaatgtctggcttctgataaagcgggccatgttaagggcggttttttcctgtttggtcactgatgcctccgtgtaagggggatttctgttcatgggggtaatgataccgatgaaacgagagaggatgctcacgatacgggttactgatgatgaacatgcccggttactggaacgttgtgagggtaaacaactggcggtatggatgcggcgggaccagagaaaaatcactcagggtcaatgccagcgcttcgttaatacagatgtaggtgttccacagggtagccagcagcatcctgcgatgcagatccggaacataatggtgcagggcgctgacttccgcgtttccagactttacgaaacacggaaaccgaagaccattcatgttgttgctcaggtcgcagacgttttgcagcagcagtcgcttcacgttcgctcgcgtatcggtgattcattctgctaaccagtaaggcaaccccgccagcctagccgggtcctcaacgacaggagcacgatcatgcgcacccgtggccaggacccaacgctgcccgagatgcgccgcgtgcggctgctggagatggcggacgcgatggatatgttctgccaagggttggtttgcgcattcacagttctccgcaagaattgattggctccaattcttggagtggtgaatccgttagcgaggtgccgccggcttccattcaggtcgaggtggcccggctccatgcaccgcgacgcaacgcggggaggcagacaaggtatagggcggcgcctacaatccatgccaacccgttccatgtgctcgccgaggcggcataaatcgccgtgacgatcagcggtccagtgatcgaagttaggctggtaagagccgcgagcgatccttgaagctgtccctgatggtcgtcatctacctgcctggacagcatggcctgcaacgcgggcatcccgatgccgccggaagcgagaagaatcataatggggaaggccatccagcctcgcgtcgcgaacgccagcaagacgtagcccagcgcgtcggccgccatgccggcgataatggcctgcttctcgccgaaacgtttggtggcgggaccagtgacgaaggcttgagcgagggcgtgcaagattccgaataccgcaagcgacaggccgatcatcgtcgcgctccagcgaaagcggtcctcgccgaaaatgacccagagcgctgccggcacctgtcctacgagttgcatgataaagaagacagtcataagtgcggcgacgatagtcatgccccgcgcccaccggaaggagctgactgggttgaaggctctcaagggcatcggtcgagatcccggtgcctaatgagtgagctaacttacattaattgcgttgcgctcactgcccgctttccagtcgggaaacctgtcgtgccagctgcattaatgaatcggccaacgcgcggggagaggcggtttgcgtattgggcgccagggtggtttttcttttcaccagtgagacgggcaacagctgattgcccttcaccgcctggccctgagagagttgcagcaagcggtccacgctggtttgccccagcaggcgaaaatcctgtttgatggtggttaacggcgggatataacatgagctgtcttcggtatcgtcgtatcccactaccgagatatccgcaccaacgcgcagcccggactcggtaatggcgcgcattgcgcccagcgccatctgatcgttggcaaccagcatcgcagtgggaacgatgccctcattcagcatttgcatggtttgttgaaaaccggacatggcactccagtcgccttcccgttccgctatcggctgaatttgattgcgagtgagatatttatgccagccagccagacgcagacgcgccgagacagaacttaatgggcccgctaacagcgcgatttgctggtgacccaatgcgaccagatgctccacgcccagtcgcgtaccgtcttcatgggagaaaataatactgttgatgggtgtc

SEQ ID NO: 90 - protein, 11 aa, Serratia entomophila
MPYSSESKEKE

SEQ ID NO: 91 - protein, 37 aa, Serratia entomophila; identical to SEQ ID NO: 82

SEQ ID NO: 92 - DNA, 5905 bp, Serratia entomophila
  source 1..5905: mol_type = other DNA
  CDS 933..947: note = Afp18-NT5
  CDS 948..1061: note = LL37 codon optimized
tggtcagagacatcaagaaataacgccggaacattagtgcaggcagcttccacagcaatggcatcctggtcatccagcggatagttaatgatcagcccactgacgcgttgcgcgagaagattgtgcaccgccgctttacaggcttcgacgccgcttcgttctaccatcgacaccaccacgctggcacccagttgatcggcgcgagatttaatcgccgcgacaatttgcgacggcgcgtgcagggccagactggaggtggcaacgccaatcagcaacgactgtttgcccgccagttgttgtgccacgcggttgggaatgtaattcagctccgccatcgccgcttccactttttcccgcgttttcgcagaaacgtggctggcctggttcaccacgcgggaaacggtctgataagagacaccggcatactctgcgacatcgtataacgttactggtttcacattcaccaccctgaattgactctcttccgggcgctatcatgccataccgcgaaaggttttgcgccattcgatggtgtccgggatctcgacgctctcccttatgcgactcctgcattaggaagcagcccagtagtaggttgaggccgttgagcaccgccgccgcaaggaatggtgcatgcaaggagatggcgcccaacagtcccccggccacggggcctgccaccatacccacgccgaaacaagcgctcatgagcccgaagtggcgagcccgatcttccccatcggtgatgtcggcgatataggcgccagcaaccgcacctgtggcgccggtgatgccggccacgatgcgtccggcgtagaggatcgagatctcgatcccgcgaaattaatacgactcactataggggaattgtgagcggataacaattcccctctagaaataattttgtttaactttaagaaggagatatacatatgccttactccagtctgctgggtgacttctttcgtaagagcaaagagaagatcggcaaagagttcaagcgtatcgtgcagcgtattaaagattttctgcgtaacctggttccgcgtaccgagagctaaggtacccttgaggtgctgtttcagggaccaggaggtagtggatctgcttggagccatccacagttcgaaaaaggtggaggttctggcggtggatcaggtggaagtgcatggtctcaccctcagtttgagaaataaggatccggctgctaacaaagcccgaaaggaagctgagttggctgctgccaccgctgagcaataactagcataaccccttggggcctctaaacgggtcttgaggggttttttgctgaaaggaggaactatatccggatatcccgcaagaggcccggcagtaccggcataaccaagcctatgcctacagcatccagggtgacggtgccgaggatgacgatgagcgcattgttagatttcatacacggtgcctgactgcgttagcaatttaactgtgataaactaccgcattaaagcttatcgatgataagctgtcaaacatgagaattcttgaagacgaaagggcctcgtgatacgcctatttttataggttaatgtcatgataataatggtttcttagacgtcaggtggcacttttcggggaaatgtgcgcggaacccctatttgtttatttttctaaatacattcaaatatgtatccgctcatgagacaataaccctgataaatgcttcaataatattgaaaaaggaagagtatgagtattcaacatttccgtgtcgcccttattcccttttttgcggcattttgccttcctgtttttgctcacccagaaacgctggtgaaagtaaaagatgctgaagatcagttgggtgcacgagtgggttacatcgaactggatctcaacagcggtaagatccttgagagttttcgccccgaagaacgttttccaatgatgagcacttttaaagttctgctatgtggcgcggtattatcccgtgttgacgccgggcaagagcaactcggtcgccgcatacactattctcagaatgacttggttgagtactcaccagtcacagaaaagcatcttacggatggcatgacagtaagagaattatgcagtgctgccataaccatgagtgataacactgcggccaacttacttctgacaacgatcggaggaccgaaggagctaaccgcttttttgcacaacatgggggatcatgtaactcgccttgatcgttgggaaccggagctgaatgaagccataccaaacgacgagcgtgacaccacgatgcctgcagcaatggcaacaacgttgcgcaaactattaactggcgaactacttactctagcttcccggcaacaattaatagactggatggaggcggataaagttgcaggaccacttctgcgctcggcccttccggctggctggtttattgctgataaatctggagccggtgagcgtgggtctcgcggtatcattgcagcactggggccagatggtaagccctcccgtatcgtagttatctacacgacggggagtcaggcaactatggatgaacgaaatagacagatcgctgagataggtgcctcactgattaagcattggtaactgtcagaccaagtttactcatatatactttagattgatttaaaacttcatttttaatttaaaaggatctaggtgaagatcctttttgataatctcatgaccaaaatcccttaacgtgagttttcgttccactgagcgtcagaccccgtagaaaagatcaaaggatcttcttgagatcctttttttctgcgcgtaatctgctgcttgcaaacaaaaaaaccaccgctaccagcggtggtttgtttgccggatcaagagctaccaactctttttccgaaggtaactggcttcagcagagcgcagataccaaatactgtccttctagtgtagccgtagttaggccaccacttcaagaactctgtagcaccgcctacatacctcgctctgctaatcctgttaccagtggctgctgccagtggcgataagtcgtgtcttaccgggttggactcaagacgatagttaccggataaggcgcagcggtcgggctgaacggggggttcgtgcacacagcccagcttggagcgaacgacctacaccgaactgagatacctacagcgtgagctatgagaaagcgccacgcttcccgaagggagaaaggcggacaggtatccggtaagcggcagggtcggaacaggagagcgcacgagggagcttccagggggaaacgcctggtatctttatagtcctgtcgggtttcgccacctctgacttgagcgtcgatttttgtgatgctcgtcaggggggcggagcctatggaaaaacgccagcaacgcggcctttttacggttcctggccttttgctggccttttgctcacatgttctttcctgcgttatcccctgattctgtggataaccgtattaccgcctttgagtgagctgataccgctcgccgcagccgaacgaccgagcgcagcgagtcagtgagcgaggaagcggaagagcgcctgatgcggtattttctccttacgcatctgtgcggtatttcacaccgcatatatggtgcactctcagtacaatctgctctgatgccgcatagttaagccagtatacactccgctatcgctacgtgactgggtcatggctgcgccccgacacccgccaacacccgctgacgcgccctgacgggcttgtctgctcccggcatccgcttacagacaagctgtgaccgtctccgggagctgcatgtgtcagaggttttcaccgtcatcaccgaaacgcgcgaggcagctgcggtaaagctcatcagcgtggtcgtgaagcgattcacagatgtctgcctgttcatccgcgtccagctcgttgagtttctccagaagcgttaatgtctggcttctgataaagcgggccatgttaagggcggttttttcctgtttggtcactgatgcctccgtgtaagggggatttctgttcatgggggtaatgataccgatgaaacgagagaggatgctcacgatacgggttactgatgatgaacatgcccggttactggaacgttgtgagggtaaacaactggcggtatggatgcggcgggaccagagaaaaatcactcagggtcaatgccagcgcttcgttaatacagatgtaggtgttccacagggtagccagcagcatcctgcgatgcagatccggaacataatggtgcagggcgctgacttccgcgtttccagactttacgaaacacggaaaccgaagaccattcatgttgttgctcaggtcgcagacgttttgcagcagcagtcgcttcacgttcgctcgcgtatcggtgattcattctgctaaccagtaaggcaaccccgccagcctagccgggtcctcaacgacaggagcacgatcatgcgcacccgtggccaggacccaacgctgcccgagatgcgccgcgtgcggctgctggagatggcggacgcgatggatatgttctgccaagggttggtttgcgcattcacagttctccgcaagaattgattggctccaattcttggagtggtgaatccgttagcgaggtgccgccggcttccattcaggtcgaggtggcccggctccatgcaccgcgacgcaacgcggggaggcagacaaggtatagggcggcgcctacaatccatgccaacccgttccatgtgctcgccgaggcggcataaatcgccgtgacgatcagcggtccagtgatcgaagttaggctggtaagagccgcgagcgatccttgaagctgtccctgatggtcgtcatctacctgcctggacagcatggcctgcaacgcgggcatcccgatgccgccggaagcgagaagaatcataatggggaaggccatccagcctcgcgtcgcgaacgccagcaagacgtagcccagcgcgtcggccgccatgccggcgataatggcctgcttctcgccgaaacgtttggtggcgggaccagtgacgaaggcttgagcgagggcgtgcaagattccgaataccgcaagcgacaggccgatcatcgtcgcgctccagcgaaagcggtcctcgccgaaaatgacccagagcgctgccggcacctgtcctacgagttgcatgataaagaagacagtcataagtgcggcgacgatagtcatgccccgcgcccaccggaaggagctgactgggttgaaggctctcaagggcatcggtcgagatcccggtgcctaatgagtgagctaacttacattaattgcgttgcgctcactgcccgctttccagtcgggaaacctgtcgtgccagctgcattaatgaatcggccaacgcgcggggagaggcggtttgcgtattgggcgccagggtggtttttcttttcaccagtgagacgggcaacagctgattgcccttcaccgcctggccctgagagagttgcagcaagcggtccacgctggtttgccccagcaggcgaaaatcctgtttgatggtggttaacggcgggatataacatgagctgtcttcggtatcgtcgtatcccactaccgagatatccgcaccaacgcgcagcccggactcggtaatggcgcgcattgcgcccagcgccatctgatcgttggcaaccagcatcgcagtgggaacgatgccctcattcagcatttgcatggtttgttgaaaaccggacatggcactccagtcgccttcccgttccgctatcggctgaatttgattgcgagtgagatatttatgccagccagccagacgcagacgcgccgagacagaacttaatgggcccgctaacagcgcgatttgctggtgacccaatgcgaccagatgctccacgcccagtcgcgtaccgtcttcatgggagaaaataatactgttgatgggtgtc

SEQ ID NO: 93 - protein, 5 aa, Serratia entomophila
MPYSS

SEQ ID NO: 94 - protein, 37 aa, Serratia entomophila; identical to SEQ ID NO: 82

SEQ ID NO: 95 - DNA, 5896 bp, Serratia entomophila
  source 1..5896: mol_type = other DNA
  CDS 933..938: note = Afp18-NT2
  CDS 939..1052: note = LL37 codon optimized
tggtcagagacatcaagaaataacgccggaacattagtgcaggcagcttccacagcaatggcatcctggtcatccagcggatagttaatgatcagcccactgacgcgttgcgcgagaagattgtgcaccgccgctttacaggcttcgacgccgcttcgttctaccatcgacaccaccacgctggcacccagttgatcggcgcgagatttaatcgccgcgacaatttgcgacggcgcgtgcagggccagactggaggtggcaacgccaatcagcaacgactgtttgcccgccagttgttgtgccacgcggttgggaatgtaattcagctccgccatcgccgcttccactttttcccgcgttttcgcagaaacgtggctggcctggttcaccacgcgggaaacggtctgataagagacaccggcatactctgcgacatcgtataacgttactggtttcacattcaccaccctgaattgactctcttccgggcgctatcatgccataccgcgaaaggttttgcgccattcgatggtgtccgggatctcgacgctctcccttatgcgactcctgcattaggaagcagcccagtagtaggttgaggccgttgagcaccgccgccgcaaggaatggtgcatgcaaggagatggcgcccaacagtcccccggccacggggcctgccaccatacccacgccgaaacaagcgctcatgagcccgaagtggcgagcccgatcttccccatcggtgatgtcggcgatataggcgccagcaaccgcacctgtggcgccggtgatgccggccacgatgcgtccggcgtagaggatcgagatctcgatcccgcgaaattaatacgactcactataggggaattgtgagcggataacaattcccctctagaaataattttgtttaactttaagaaggagatatacatatgcctctgctgggtgacttctttcgtaagagcaaagagaagatcggcaaagagttcaagcgtatcgtgcagcgtattaaagattttctgcgtaacctggttccgcgtaccgagagctaaggtacccttgaggtgctgtttcagggaccaggaggtagtggatctgcttggagccatccacagttcgaaaaaggtggaggttctggcggtggatcaggtggaagtgcatggtctcaccctcagtttgagaaataaggatccggctgctaacaaagcccgaaaggaagctgagttggctgctgccaccgctgagcaataactagcataaccccttggggcctctaaacgggtcttgaggggttttttgctgaaaggaggaactatatccggatatcccgcaagaggcccggcagtaccggcataaccaagcctatgcctacagcatccagggtgacggtgccgaggatgacgatgagcgcattgttagatttcatacacggtgcctgactgcgttagcaatttaactgtgataaactaccgcattaaagcttatcgatgataagctgtcaaacatgagaattcttgaagacgaaagggcctcgtgatacgcctatttttataggttaatgtcatgataataatggtttcttagacgtcaggtggcacttttcggggaaatgtgcgcggaacccctatttgtttatttttctaaatacattcaaatatgtatccgctcatgagacaataaccctgataaatgcttcaataatattgaaaaaggaagagtatgagtattcaacatttccgtgtcgcccttattcccttttttgcggcattttgccttcctgtttttgctcacccagaaacgctggtgaaagtaaaagatgctgaagatcagttgggtgcacgagtgggttacatcgaactggatctcaacagcggtaagatccttgagagttttcgccccgaagaacgttttccaatgatgagcacttttaaagttctgctatgtggcgcggtattatcccgtgttgacgccgggcaagagcaactcggtcgccgcatacactattctcagaatgacttggttgagtactcaccagtcacagaaaagcatcttacggatggcatgacagtaagagaattatgcagtgctgccataaccatgagtgataacactgcggccaacttacttctgacaacgatcggaggaccgaaggagctaaccgcttttttgcacaacatgggggatcatgtaactcgccttgatcgttgggaaccggagctgaatgaagccataccaaacgacgagcgtgacaccacgatgcctgcagcaatggcaacaacgttgcgcaaactattaactggcgaactacttactctagcttcccggcaacaattaatagactggatggaggcggataaagttgcaggaccacttctgcgctcggcccttccggctggctggtttattgctgataaatctggagccggtgagcgtgggtctcgcggtatcattgcagcactggggccagatggtaagccctcccgtatcgtagttatctacacgacggggagtcaggcaactatggatgaacgaaatagacagatcgctgagataggtgcctcactgattaagcattggtaactgtcagaccaagtttactcatatatactttagattgatttaaaacttcatttttaatttaaaaggatctaggtgaagatcctttttgataatctcatgaccaaaatcccttaacgtgagttttcgttccactgagcgtcagaccccgtagaaaagatcaaaggatcttcttgagatcctttttttctgcgcgtaatctgctgcttgcaaacaaaaaaaccaccgctaccagcggtggtttgtttgccggatcaagagctaccaactctttttccgaaggtaactggcttcagcagagcgcagataccaaatactgtccttctagtgtagccgtagttaggccaccacttcaagaactctgtagcaccgcctacatacctcgctctgctaatcctgttaccagtggctgctgccagtggcgataagtcgtgtcttaccgggttggactcaagacgatagttaccggataaggcgcagcggtcgggctgaacggggggttcgtgcacacagcccagcttggagcgaacgacctacaccgaactgagatacctacagcgtgagctatgagaaagcgccacgcttcccgaagggagaaaggcggacaggtatccggtaagcggcagggtcggaacaggagagcgcacgagggagcttccagggggaaacgcctggtatctttatagtcctgtcgggtttcgccacctctgacttgagcgtcgatttttgtgatgctcgtcaggggggcggagcctatggaaaaacgccagcaacgcggcctttttacggttcctggccttttgctggccttttgctcacatgttctttcctgcgttatcccctgattctgtggataaccgtattaccgcctttgagtgagctgataccgctcgccgcagccgaacgaccgagcgcagcgagtcagtgagcgaggaagcggaagagcgcctgatgcggtattttctccttacgcatctgtgcggtatttcacaccgcatatatggtgcactctcagtacaatctgctctgatgccgcatagttaagccagtatacactccgctatcgctacgtgactgggtcatggctgcgccccgacacccgccaacacccgctgacgcgccctgacgggcttgtctgctcccggcatccgcttacagacaagctgtgaccgtctccgggagctgcatgtgtcagaggttttcaccgtcatcaccgaaacgcgcgaggcagctgcggtaaagctcatcagcgtggtcgtgaagcgattcacagatgtctgcctgttcatccgcgtccagctcgttgagtttctccagaagcgttaatgtctggcttctgataaagcgggccatgttaagggcggttttttcctgtttggtcactgatgcctccgtgtaagggggatttctgttcatgggggtaatgataccgatgaaacgagagaggatgctcacgatacgggttactgatgatgaacatgcccggttactggaacgttgtgagggtaaacaactggcggtatggatgcggcgggaccagagaaaaatcactcagggtcaatgccagcgcttcgttaatacagatgtaggtgttccacagggtagccagcagcatcctgcgatgcagatccggaacataatggtgcagggcgctgacttccgcgtttccagactttacgaaacacggaaaccgaagaccattcatgttgttgctcaggtcgcagacgttttgcagcagcagtcgcttcacgttcgctcgcgtatcggtgattcattctgctaaccagtaaggcaaccccgccagcctagccgggtcctcaacgacaggagcacgatcatgcgcacccgtggccaggacccaacgctgcccgagatgcgccgcgtgcggctgctggagatggcggacgcgatggatatgttctgccaagggttggtttgcgcattcacagttctccgcaagaattgattggctccaattcttggagtggtgaatccgttagcgaggtgccgccggcttccattcaggtcgaggtggcccggctccatgcaccgcgacgcaacgcggggaggcagacaaggtatagggcggcgcctacaatccatgccaacccgttccatgtgctcgccgaggcggcataaatcgccgtgacgatcagcggtccagtgatcgaagttaggctggtaagagccgcgagcgatccttgaagctgtccctgatggtcgtcatctacctgcctggacagcatggcctgcaacgcgggcatcccgatgccgccggaagcgagaagaatcataatggggaaggccatccagcctcgcgtcgcgaacgccagcaagacgtagcccagcgcgtcggccgccatgccggcgataatggcctgcttctcgccgaaacgtttggtggcgggaccagtgacgaaggcttgagcgagggcgtgcaagattccgaataccgcaagcgacaggccgatcatcgtcgcgctccagcgaaagcggtcctcgccgaaaatgacccagagcgctgccggcacctgtcctacgagttgcatgataaagaagacagtcataagtgcggcgacgatagtcatgccccgcgcccaccggaaggagctgactgggttgaaggctctcaagggcatcggtcgagatcccggtgcctaatgagtgagctaacttacattaattgcgttgcgctcactgcccgctttccagtcgggaaacctgtcgtgccagctgcattaatgaatcggccaacgcgcggggagaggcggtttgcgtattgggcgccagggtggtttttcttttcaccagtgagacgggcaacagctgattgcccttcaccgcctggccctgagagagttgcagcaagcggtccacgctggtttgccccagcaggcgaaaatcctgtttgatggtggttaacggcgggatataacatgagctgtcttcggtatcgtcgtatcccactaccgagatatccgcaccaacgcgcagcccggactcggtaatggcgcgcattgcgcccagcgccatctgatcgttggcaaccagcatcgcagtgggaacgatgccctcattcagcatttgcatggtttgttgaaaaccggacatggcactccagtcgccttcccgttccgctatcggctgaatttgattgcgagtgagatatttatgccagccagccagacgcagacgcgccgagacagaacttaatgggcccgctaacagcgcgatttgctggtgacccaatgcgaccagatgctccacgcccagtcgcgtaccgtcttcatgggagaaaataatactgttgatgggtgtc

SEQ ID NO: 96 - protein, 37 aa, Serratia entomophila; identical to SEQ ID NO: 82

SEQ ID NO: 97 - DNA, 8200 bp, Serratia entomophila
  source 1..8200: mol_type = other DNA
  CDS 933..1082: note = Afp18-NT50
  CDS 1083..3356: note = Casphi2 codon optimized
tggtcagagacatcaagaaataacgccggaacattagtgcaggcagcttccacagcaatggcatcctggtcatccagcggatagttaatgatcagcccactgacgcgttgcgcgagaagattgtgcaccgccgctttacaggcttcgacgccgcttcgttctaccatcgacaccaccacgctggcacccagttgatcggcgcgagatttaatcgccgcgacaatttgcgacggcgcgtgcagggccagactggaggtggcaacgccaatcagcaacgactgtttgcccgccagttgttgtgccacgcggttgggaatgtaattcagctccgccatcgccgcttccactttttcccgcgttttcgcagaaacgtggctggcctggttcaccacgcgggaaacggtctgataagagacaccggcatactctgcgacatcgtataacgttactggtttcacattcaccaccctgaattgactctcttccgggcgctatcatgccataccgcgaaaggttttgcgccattcgatggtgtccgggatctcgacgctctcccttatgcgactcctgcattaggaagcagcccagtagtaggttgaggccgttgagcaccgccgccgcaaggaatggtgcatgcaaggagatggcgcccaacagtcccccggccacggggcctgccaccatacccacgccgaaacaagcgctcatgagcccgaagtggcgagcccgatcttccccatcggtgatgtcggcgatataggcgccagcaaccgcacctgtggcgccggtgatgccggccacgatgcgtccggcgtagaggatcgagatctcgatcccgcgaaattaatacgactcactataggggaattgtgagcggataacaattcccctctagaaataattttgtttaactttaagaaggagatatacatatgccttactccagtgagtcgaaggaaaaagaaacacactcaaaagaaaccgaaagagataatgctgacccagtatttcaacgggtcagccagggcggcgtgggtgtttcaccgcctgatgaggggggagacttgtcggccggaagtaacatgccgaaaccggcggtggagagcgagttcagcaaggttctgaagaaacacttcccgggcgagcgttttcgtagcagctacatgaaacgtggtggcaagatcctggcggcgcaaggcgaggaagcggtggttgcgtatctgcagggcaaaagcgaggaagagccgccgaacttccaaccgccggcgaaatgccacgtggttaccaagagccgtgactttgcggagtggccgattatgaaggcgagcgaagcgatccagcgttacatttatgcgctgagcaccaccgagcgtgcggcgtgcaaaccgggcaagagcagcgaaagccatgcggcgtggtttgcggcgaccggcgtgagcaaccacggctacagccacgttcaaggcctgaacctgatctttgaccacaccctgggtcgttatgatggcgtgctgaagaaagttcagctgcgtaacgagaaagcgcgtgcgcgtctggaaagcatcaacgcgagccgtgcggatgagggtctgccggaaattaaggcggaagaggaagaggtggcgaccaacgaaaccggccacctgctgcagccgccgggtatcaacccgagcttttacgtttatcaaaccattagcccgcaggcgtaccgtccgcgtgacgagattgtgctgccgccggaatacgcgggttatgttcgtgatccgaacgcgccgattccgctgggcgtggttcgtaaccgttgcgacatccaaaaaggttgcccgggctacattccggagtggcagcgtgaagcgggtaccgcgatcagcccgaaaaccggcaaggcggtgaccgttccgggtctgagcccgaagaaaaacaagcgtatgcgtcgttattggcgtagcgagaaagaaaaggcgcaagatgcgctgctggtgaccgttcgtatcggtaccgactgggtggttattgatgttcgtggcctgctgcgtaacgcgcgttggcgtaccatcgcgccgaaagacattagcctgaacgcgctgctggacctgttcaccggcgacccggtgatcgatgttcgtcgtaacattgttacctttacctacaccctggacgcgtgcggtacctatgcgcgtaagtggaccctgaaaggcaagcagaccaaagcgaccctggacaagctgaccgcgacccaaaccgtggcgctggttgcgatcgatctgggtcagaccaacccgatcagcgcgggcattagccgtgtgacccaagagaacggtgcgctgcagtgcgaaccgctggaccgtttcaccctgccggacgatctgctgaaagacatcagcgcgtaccgtattgcgtgggatcgtaacgaagaggaactgcgtgcgcgtagcgttgaggcgctgccggaagcgcagcaagcggaagtgcgtgcgctggatggtgttagcaaggaaaccgcgcgtacccaactgtgcgcggacttcggtctggacccgaaacgtctgccgtgggacaagatgagcagcaacaccacctttatcagcgaggcgctgctgagcaacagcgtgagccgtgatcaggttttctttaccccggcgccgaagaaaggtgcgaagaaaaaggcgccggtggaagttatgcgtaaagaccgtacctgggcgcgtgcgtataagccgcgtctgagcgtggaggcgcagaaactgaagaacgaagcgctgtgggcgctgaaacgtaccagcccggagtacctgaaactgagccgtcgtaaagaggagctgtgccgtcgtagcatcaactatgtgattgagaagacccgtcgtcgtacccagtgccaaatcgtgattccggttattgaagacctgaacgttcgtttctttcacggtagcggcaaacgtctgccgggttgggataacttctttaccgcgaaaaaggaaaaccgttggttcatccaaggcctgcacaaggcgtttagcgacctgcgtacccaccgtagcttctacgtgtttgaggttcgtccggaacgtaccagcattacctgcccgaaatgcggtcactgcgaggttggtaaccgtgatggcgaagcgttccagtgcctgagctgcggcaagacctgcaacgcggacctggatgtggcgacccacaacctgacccaagttgcgctgaccggcaaaaccatgccgaagcgtgaggaaccgcgtgacgcgcagggtaccgcgccggcgcgtaaaaccaaaaaggcgagcaaaagcaaggctccgccggcggagcgtgaagatcaaaccccggcgcaagagccgagccagaccagctaaggtacccttgaggtgctgtttcagggaccaggaggtagtggatctgcttggagccatccacagttcgaaaaaggtggaggttctggcggtggatcaggtggaagtgcatggtctcaccctcagtttgagaaataaggatccggctgctaacaaagcccgaaaggaagctgagttggctgctgccaccgctgagcaataactagcataaccccttggggcctctaaacgggtcttgaggggttttttgctgaaaggaggaactatatccggatatcccgcaagaggcccggcagtaccggcataaccaagcctatgcctacagcatccagggtgacggtgccgaggatgacgatgagcgcattgttagatttcatacacggtgcctgactgcgttagcaatttaactgtgataaactaccgcattaaagcttatcgatgataagctgtcaaacatgagaattcttgaagacgaaagggcctcgtgatacgcctatttttataggttaatgtcatgataataatggtttcttagacgtcaggtggcacttttcggggaaatgtgcgcggaacccctatttgtttatttttctaaatacattcaaatatgtatccgctcatgagacaataaccctgataaatgcttcaataatattgaaaaaggaagagtatgagtattcaacatttccgtgtcgcccttattcccttttttgcggcattttgccttcctgtttttgctcacccagaaacgctggtgaaagtaaaagatgctgaagatcagttgggtgcacgagtgggttacatcgaactggatctcaacagcggtaagatccttgagagttttcgccccgaagaacgttttccaatgatgagcacttttaaagttctgctatgtggcgcggtattatcccgtgttgacgccgggcaagagcaactcggtcgccgcatacactattctcagaatgacttggttgagtactcaccagtcacagaaaagcatcttacggatggcatgacagtaagagaattatgcagtgctgccataaccatgagtgataacactgcggccaacttacttctgacaacgatcggaggaccgaaggagctaaccgcttttttgcacaacatgggggatcatgtaactcgccttgatcgttgggaaccggagctgaatgaagccataccaaacgacgagcgtgacaccacgatgcctgcagcaatggcaacaacgttgcgcaaactattaactggcgaactacttactctagcttcccggcaacaattaatagactggatggaggcggataaagttgcaggaccacttctgcgctcggcccttccggctggctggtttattgctgataaatctggagccggtgagcgtgggtctcgcggtatcattgcagcactggggccagatggtaagccctcccgtatcgtagttatctacacgacggggagtcaggcaactatggatgaacgaaatagacagatcgctgagataggtgcctcactgattaagcattggtaactgtcagaccaagtttactcatatatactttagattgatttaaaacttcatttttaatttaaaaggatctaggtgaagatcctttttgataatctcatgaccaaaatcccttaacgtgagttttcgttccactgagcgtcagaccccgtagaaaagatcaaaggatcttcttgagatcctttttttctgcgcgtaatctgctgcttgcaaacaaaaaaaccaccgctaccagcggtggtttgtttgccggatcaagagctaccaactctttttccgaaggtaactggcttcagcagagcgcagataccaaatactgtccttctagtgtagccgtagttaggccaccacttcaagaactctgtagcaccgcctacatacctcgctctgctaatcctgttaccagtggctgctgccagtggcgataagtcgtgtcttaccgggttggactcaagacgatagttaccggataaggcgcagcggtcgggctgaacggggggttcgtgcacacagcccagcttggagcgaacgacctacaccgaactgagatacctacagcgtgagctatgagaaagcgccacgcttcccgaagggagaaaggcggacaggtatccggtaagcggcagggtcggaacaggagagcgcacgagggagcttccagggggaaacgcctggtatctttatagtcctgtcgggtttcgccacctctgacttgagcgtcgatttttgtgatgctcgtcaggggggcggagcctatggaaaaacgccagcaacgcggcctttttacggttcctggccttttgctggccttttgctcacatgttctttcctgcgttatcccctgattctgtggataaccgtattaccgcctttgagtgagctgataccgctcgccgcagccgaacgaccgagcgcagcgagtcagtgagcgaggaagcggaagagcgcctgatgcggtattttctccttacgcatctgtgcggtatttcacaccgcatatatggtgcactctcagtacaatctgctctgatgccgcatagttaagccagtatacactccgctatcgctacgtgactgggtcatggctgcgccccgacacccgccaacacccgctgacgcgccctgacgggcttgtctgctcccggcatccgcttacagacaagctgtgaccgtctccgggagctgcatgtgtcagaggttttcaccgtcatcaccgaaacgcgcgaggcagctgcggtaaagctcatcagcgtggtcgtgaagcgattcacagatgtctgcctgttcatccgcgtccagctcgttgagtttctccagaagcgttaatgtctggcttctgataaagcgggccatgttaagggcggttttttcctgtttggtcactgatgcctccgtgtaagggggatttctgttcatgggggtaatgataccgatgaaacgagagaggatgctcacgatacgggttactgatgatgaacatgcccggttactggaacgttgtgagggtaaacaactggcggtatggatgcggcgggaccagagaaaaatcactcagggtcaatgccagcgcttcgttaatacagatgtaggtgttccacagggtagccagcagcatcctgcgatgcagatccggaacataatggtgcagggcgctgacttccgcgtttccagactttacgaaacacggaaaccgaagaccattcatgttgttgctcaggtcgcagacgttttgcagcagcagtcgcttcacgttcgctcgcgtatcggtgattcattctgctaaccagtaaggcaaccccgccagcctagccgggtcctcaacgacaggagcacgatcatgcgcacccgtggccaggacccaacgctgcccgagatgcgccgcgtgcggctgctggagatggcggacgcgatggatatgttctgccaagggttggtttgcgcattcacagttctccgcaagaattgattggctccaattcttggagtggtgaatccgttagcgaggtgccgccggcttccattcaggtcgaggtggcccggctccatgcaccgcgacgcaacgcggggaggcagacaaggtatagggcggcgcctacaatccatgccaacccgttccatgtgctcgccgaggcggcataaatcgccgtgacgatcagcggtccagtgatcgaagttaggctggtaagagccgcgagcgatccttgaagctgtccctgatggtcgtcatctacctgcctggacagcatggcctgcaacgcgggcatcccgatgccgccggaagcgagaagaatcataatggggaaggccatccagcctcgcgtcgcgaacgccagcaagacgtagcccagcgcgtcggccgccatgccggcgataatggcctgcttctcgccgaaacgtttggtggcgggaccagtgacgaaggcttgagcgagggcgtgcaagattccgaataccgcaagcgacaggccgatcatcgtcgcgctccagcgaaagcggtcctcgccgaaaatgacccagagcgctgccggcacctgtcctacgagttgcatgataaagaagacagtcataagtgcggcgacgatagtcatgccccgcgcccaccggaaggagctgactgggttgaaggctctcaagggcatcggtcgagatcccggtgcctaatgagtgagctaacttacattaattgcgttgcgctcactgcccgctttccagtcgggaaacctgtcgtgccagctgcattaatgaatcggccaacgcgcggggagaggcggtttgcgtattgggcgccagggtggtttttcttttcaccagtgagacgggcaacagctgattgcccttcaccgcctggccctgagagagttgcagcaagcggtccacgctggtttgccccagcaggcgaaaatcctgtttgatggtggttaacggcgggatataacatgagctgtcttcggtatcgtcgtatcccactaccgagatatccgcaccaacgcgcagcccggactcggtaatggcgcgcattgcgcccagcgccatctgatcgttggcaaccagcatcgcagtgggaacgatgccctcattcagcatttgcatggtttgttgaaaaccggacatggcactccagtcgccttcccgttccgctatcggctgaatttgattgcgagtgagatatttatgccagccagccagacgcagacgcgccgagacagaacttaatgggcccgctaacagcgcgatttgctggtgacccaatgcgaccagatgctccacgcccagtcgcgtaccgtcttcatgggagaaaataatactgttgatgggtgtc

SEQ ID NO: 98 - protein, 50 aa, Serratia entomophila; identical to SEQ ID NO: 81

SEQ ID NO: 99 - protein, 757 aa, Serratia entomophila
MPKPAVESEFSKVLKKHFPGERFRSSYMKRGGKILAAQGEEAVVAYLQGKSEEEPPNFQPPAKCHVVTKSRDFAEWPIMKASEAIQRYIYALSTTERAACKPGKSSESHAAWFAATGVSNHGYSHVQGLNLIFDHTLGRYDGVLKKVQLRNEKARARLESINASRADEGLPEIKAEEEEVATNETGHLLQPPGINPSFYVYQTISPQAYRPRDEIVLPPEYAGYVRDPNAPIPLGVVRNRCDIQKGCPGYIPEWQREAGTAISPKTGKAVTVPGLSPKKNKRMRRYWRSEKEKAQDALLVTVRIGTDWVVIDVRGLLRNARWRTIAPKDISLNALLDLFTGDPVIDVRRNIVTFTYTLDACGTYARKWTLKGKQTKATLDKLTATQTVALVAIDLGQTNPISAGISRVTQENGALQCEPLDRFTLPDDLLKDISAYRIAWDRNEEELRARSVEALPEAQQAEVRALDGVSKETARTQLCADFGLDPKRLPWDKMSSNTTFISEALLSNSVSRDQVFFTPAPKKGAKKKAPVEVMRKDRTWARAYKPRLSVEAQKLKNEALWALKRTSPEYLKLSRRKEELCRRSINYVIEKTRRRTQCQIVIPVIEDLNVRFFHGSGKRLPGWDNFFTAKKENRWFIQGLHKAFSDLRTHRSFYVFEVRPERTSITCPKCGHCEVGNRDGEAFQCLSCGKTCNADLDVATHNLTQVALTGKTMPKREEPRDAQGTAPARKTKKASKSKAPPAEREDQTPAQEPSQTS

SEQ ID NO: 100 - DNA, 8140 bp, Serratia entomophila
  source 1..8140: mol_type = other DNA
  CDS 933..1022: note = Afp18-NT30
  CDS 1023..3296: note = Casphi2 codon optimized
tggtcagagacatcaagaaataacgccggaacattagtgcaggcagcttccacagcaatggcatcctggtcatccagcggatagttaatgatcagcccactgacgcgttgcgcgagaagattgtgcaccgccgctttacaggcttcgacgccgcttcgttctaccatcgacaccaccacgctggcacccagttgatcggcgcgagatttaatcgccgcgacaatttgcgacggcgcgtgcagggccagactggaggtggcaacgccaatcagcaacgactgtttgcccgccagttgttgtgccacgcggttgggaatgtaattcagctccgccatcgccgcttccactttttcccgcgttttcgcagaaacgtggctggcctggttcaccacgcgggaaacggtctgataagagacaccggcatactctgcgacatcgtataacgttactggtttcacattcaccaccctgaattgactctcttccgggcgctatcatgccataccgcgaaaggttttgcgccattcgatggtgtccgggatctcgacgctctcccttatgcgactcctgcattaggaagcagcccagtagtaggttgaggccgttgagcaccgccgccgcaaggaatggtgcatgcaaggagatggcgcccaacagtcccccggccacggggcctgccaccatacccacgccgaaacaagcgctcatgagcccgaagtggcgagcccgatcttccccatcggtgatgtcggcgatataggcgccagcaaccgcacctgtggcgccggtgatgccggccacgatgcgtccggcgtagaggatcgagatctcgatcccgcgaaattaatacgactcactataggggaattgtgagcggataacaattcccctctagaaataattttgtttaactttaagaaggagatatacatatgccttactccagtgagtcgaaggaaaaagaaacacactcaaaagaaaccgaaagagataatgctgacccagtatttcaacgggtcagcatgccgaaaccggcggtggagagcgagttcagcaaggttctgaagaaacacttcccgggcgagcgttttcgtagcagctacatgaaacgtggtggcaagatcctggcggcgcaaggcgaggaagcggtggttgcgtatctgcagggcaaaagcgaggaagagccgccgaacttccaaccgccggcgaaatgccacgtggttaccaagagccgtgactttgcggagtggccgattatgaaggcgagcgaagcgatccagcgttacatttatgcgctgagcaccaccgagcgtgcggcgtgcaaaccgggcaagagcagcgaaagccatgcggcgtggtttgcggcgaccggcgtgagcaaccacggctacagccacgttcaaggcctgaacctgatctttgaccacaccctgggtcgttatgatggcgtgctgaagaaagttcagctgcgtaacgagaaagcgcgtgcgcgtctggaaagcatcaacgcgagccgtgcggatgagggtctgccggaaattaaggcggaagaggaagaggtggcgaccaacgaaaccggccacctgctgcagccgccgggtatcaacccgagcttttacgtttatcaaaccattagcccgcaggcgtaccgtccgcgtgacgagattgtgctgccgccggaatacgcgggttatgttcgtgatccgaacgcgccgattccgctgggcgtggttcgtaaccgttgcgacatccaaaaaggttgcccgggctacattccggagtggcagcgtgaagcgggtaccgcgatcagcccgaaaaccggcaaggcggtgaccgttccgggtctgagcccgaagaaaaacaagcgtatgcgtcgttattggcgtagcgagaaagaaaaggcgcaagatgcgctgctggtgaccgttcgtatcggtaccgactgggtggttattgatgttcgtggcctgctgcgtaacgcgcgttggcgtaccatcgcgccgaaagacattagcctgaacgcgctgctggacctgttcaccggcgacccggtgatcgatgttcgtcgtaacattgttacctttacctacaccctggacgcgtgcggtacctatgcgcgtaagtggaccctgaaaggcaagcagaccaaagcgaccctggacaagctgaccgcgacccaaaccgtggcgctggttgcgatcgatctgggtcagaccaacccgatcagcgcgggcattagccgtgtgacccaagagaacggtgcgctgcagtgcgaaccgctggaccgtttcaccctgccggacgatctgctgaaagacatcagcgcgtaccgtattgcgtgggatcgtaacgaagaggaactgcgtgcgcgtagcgttgaggcgctgccggaagcgcagcaagcggaagtgcgtgcgctggatggtgttagcaaggaaaccgcgcgtacccaactgtgcgcggacttcggtctggacccgaaacgtctgccgtgggacaagatgagcagcaacaccacctttatcagcgaggcgctgctgagcaacagcgtgagccgtgatcaggttttctttaccccggcgccgaagaaaggtgcgaagaaaaaggcgccggtggaagttatgcgtaaagaccgtacctgggcgcgtgcgtataagccgcgtctgagcgtggaggcgcagaaactgaagaacgaagcgctgtgggcgctgaaacgtaccagcccggagtacctgaaactgagccgtcgtaaagaggagctgtgccgtcgtagcatcaactatgtgattgagaagacccgtcgtcgtacccagtgccaaatcgtgattccggttattgaagacctgaacgttcgtttctttcacggtagcggcaaacgtctgccgggttgggataacttctttaccgcgaaaaaggaaaaccgttggttcatccaaggcctgcacaaggcgtttagcgacctgcgtacccaccgtagcttctacgtgtttgaggttcgtccggaacgtaccagcattacctgcccgaaatgcggtcactgcgaggttggtaaccgtgatggcgaagcgttccagtgcctgagctgcggcaagacctgcaacgcggacctggatgtggcgacccacaacctgacccaagttgcgctgaccggcaaaaccatgccgaagcgtgaggaaccgcgtgacgcgcagggtaccgcgccggcgcgtaaaaccaaaaaggcgagcaaaagcaaggctccgccggcggagcgtgaagatcaaaccccggcgcaagagccgagccagaccagctaaggtacccttgaggtgctgtttcagggaccaggaggtagtggatctgcttggagccatccacagttcgaaaaaggtggaggttctggcggtggatcaggtggaagtgcatggtctcaccctcagtttgagaaataaggatccggctgctaacaaagcccgaaaggaagctgagttggctgctgccaccgctgagcaataactagcataaccccttggggcctctaaacgggtcttgaggggttttttgctgaaaggaggaactatatccggatatcccgcaagaggcccggcagtaccggcataaccaagcctatgcctacagcatccagggtgacggtgccgaggatgacgatgagcgcattgttagatttcatacacggtgcctgactgcgttagcaatttaactgtgataaactaccgcattaaagcttatcgatgataagctgtcaaacatgagaattcttgaagacgaaagggcctcgtgatacgcctatttttataggttaatgtcatgataataatggtttcttagacgtcaggtggcacttttcggggaaatgtgcgcggaacccctatttgtttatttttctaaatacattcaaatatgtatccgctcatgagacaataaccctgataaatgcttcaataatattgaaaaaggaagagtatgagtattcaacatttccgtgtcgcccttattcccttttttgcggcattttgccttcctgtttttgctcacccagaaacgctggtgaaagtaaaagatgctgaagatcagttgggtgcacgagtgggttacatcgaactggatctcaacagcggtaagatccttgagagttttcgccccgaagaacgttttccaatgatgagcacttttaaagttctgctatgtggcgcggtattatcccgtgttgacgccgggcaagagcaactcggtcgccgcatacactattctcagaatgacttggttgagtactcaccagtcacagaaaagcatcttacggatggcatgacagtaagagaattatgcagtgctgccataaccatgagtgataacactgcggccaacttacttctgacaacgatcggaggaccgaaggagctaaccgcttttttgcacaacatgggggatcatgtaactcgccttgatcgttgggaaccggagctgaatgaagccataccaaacgacgagcgtgacaccacgatgcctgcagcaatggcaacaacgttgcgcaaactattaactggcgaactacttactctagcttcccggcaacaattaatagactggatggaggcggataaagttgcaggaccacttctgcgctcggcccttccggctggctggtttattgctgataaatctggagccggtgagcgtgggtctcgcggtatcattgcagcactggggccagatggtaagccctcccgtatcgtagttatctacacgacggggagtcaggcaactatggatgaacgaaatagacagatcgctgagataggtgcctcactgattaagcattggtaactgtcagaccaagtttactcatatatactttagattgatttaaaacttcatttttaatttaaaaggatctaggtgaagatcctttttgataatctcatgaccaaaatcccttaacgtgagttttcgttccactgagcgtcagaccccgtagaaaagatcaaaggatcttcttgagatcctttttttctgcgcgtaatctgctgcttgcaaacaaaaaaaccaccgctaccagcggtggtttgtttgccggatcaagagctaccaactctttttccgaaggtaactggcttcagcagagcgcagataccaaatactgtccttctagtgtagccgtagttaggccaccacttcaagaactctgtagcaccgcctacatacctcgctctgctaatcctgttaccagtggctgctgccagtggcgataagtcgtgtcttaccgggttggactcaagacgatagttaccggataaggcgcagcggtcgggctgaacggggggttcgtgcacacagcccagcttggagcgaacgacctacaccgaactgagatacctacagcgtgagctatgagaaagcgccacgcttcccgaagggagaaaggcggacaggtatccggtaagcggcagggtcggaacaggagagcgcacgagggagcttccagggggaaacgcctggtatctttatagtcctgtcgggtttcgccacctctgacttgagcgtcgatttttgtgatgctcgtcaggggggcggagcctatggaaaaacgccagcaacgcggcctttttacggttcctggccttttgctggccttttgctcacatgttctttcctgcgttatcccctgattctgtggataaccgtattaccgcctttgagtgagctgataccgctcgccgcagccgaacgaccgagcgcagcgagtcagtgagcgaggaagcggaagagcgcctgatgcggtattttctccttacgcatctgtgcggtatttcacaccgcatatatggtgcactctcagtacaatctgctctgatgccgcatagttaagccagtatacactccgctatcgctacgtgactgggtcatggctgcgccccgacacccgccaacacccgctgacgcgccctgacgggcttgtctgctcccggcatccgcttacagacaagctgtgaccgtctccgggagctgcatgtgtcagaggttttcaccgtcatcaccgaaacgcgcgaggcagctgcggtaaagctcatcagcgtggtcgtgaagcgattcacagatgtctgcctgttcatccgcgtccagctcgttgagtttctccagaagcgttaatgtctggcttctgataaagcgggccatgttaagggcggttttttcctgtttggtcactgatgcctccgtgtaagggggatttctgttcatgggggtaatgataccgatgaaacgagagaggatgctcacgatacgggttactgatgatgaacatgcccggttactggaacgttgtgagggtaaacaactggcggtatggatgcggcgggaccagagaaaaatcactcagggtcaatgccagcgcttcgttaatacagatgtaggtgttccacagggtagccagcagcatcctgcgatgcagatccggaacataatggtgcagggcgctgacttccgcgtttccagactttacgaaacacggaaaccgaagaccattcatgttgttgctcaggtcgcagacgttttgcagcagcagtcgcttcacgttcgctcgcgtatcggtgattcattctgctaaccagtaaggcaaccccgccagcctagccgggtcctcaacgacaggagcacgatcatgcgcacccgtggccaggacccaacgctgcccgagatgcgccgcgtgcggctgctggagatggcggacgcgatggatatgttctgccaagggttggtttgcgcattcacagttctccgcaagaattgattggctccaattcttggagtggtgaatccgttagcgaggtgccgccggcttccattcaggtcgaggtggcccggctccatgcaccgcgacgcaacgcggggaggcagacaaggtatagggcggcgcctacaatccatgccaacccgttccatgtgctcgccgaggcggcataaatcgccgtgacgatcagcggtccagtgatcgaagttaggctggtaagagccgcgagcgatccttgaagctgtccctgatggtcgtcatctacctgcctggacagcatggcctgcaacgcgggcatcccgatgccgccggaagcgagaagaatcataatggggaaggccatccagcctcgcgtcgcgaacgccagcaagacgtagcccagcgcgtcggccgccatgccggcgataatggcctgcttctcgccgaaacgtttggtggcgggaccagtgacgaaggcttgagcgagggcgtgcaagattccgaataccgcaagcgacaggccgatcatcgtcgcgctccagcgaaagcggtcctcgccgaaaatgacccagagcgctgccggcacctgtcctacgagttgcatgataaagaagacagtcataagtgcggcgacgatagtcatgccccgcgcccaccggaaggagctgactgggttgaaggctctcaagggcatcggtcgagatcccggtgcctaatgagtgagctaacttacattaattgcgttgcgctcactgcccgctttccagtcgggaaacctgtcgtgccagctgcattaatgaatcggccaacgcgcggggagaggcggtttgcgtattgggcgccagggtggtttttcttttcaccagtgagacgggcaacagctgattgcccttcaccgcctggccctgagagagttgcagcaagcggtccacgctggtttgccccagcaggcgaaaatcctgtttgatggtggttaacggcgggatataacatgagctgtcttcggtatcgtcgtatcccactaccgagatatccgcaccaacgcgcagcccggactcggtaatggcgcgcattgcgcccagcgccatctgatcgttggcaaccagcatcgcagtgggaacgatgccctcattcagcatttgcatggtttgttgaaaaccggacatggcactccagtcgccttcccgttccgctatcggctgaatttgattgcgagtgagatatttatgccagccagccagacgcagacgcgccgagacagaacttaatgggcccgctaacagcgcgatttgctggtgacccaatgcgaccagatgctccacgcccagtcgcgtaccgtcttcatgggagaaaataatactgttgatgggtgtc

SEQ ID NO: 101 - protein, 30 aa, Serratia entomophila; identical to SEQ ID NO: 84

SEQ ID NO: 102 - protein, 757 aa, Serratia entomophila; identical to SEQ ID NO: 99

SEQ ID NO: 103 - DNA, 8110 bp, Serratia entomophila
  source 1..8110: mol_type = other DNA
  CDS 933..992: note = Afp18-NT20
  CDS 993..3266: note = Casphi2 codon optimized
tggtcagagacatcaagaaataacgccggaacattagtgcaggcagcttccacagcaatggcatcctggtcatccagcggatagttaatgatcagcccactgacgcgttgcgcgagaagattgtgcaccgccgctttacaggcttcgacgccgcttcgttctaccatcgacaccaccacgctggcacccagttgatcggcgcgagatttaatcgccgcgacaatttgcgacggcgcgtgcagggccagactggaggtggcaacgccaatcagcaacgactgtttgcccgccagttgttgtgccacgcggttgggaatgtaattcagctccgccatcgccgcttccactttttcccgcgttttcgcagaaacgtggctggcctggttcaccacgcgggaaacggtctgataagagacaccggcatactctgcgacatcgtataacgttactggtttcacattcaccaccctgaattgactctcttccgggcgctatcatgccataccgcgaaaggttttgcgccattcgatggtgtccgggatctcgacgctctcccttatgcgactcctgcattaggaagcagcccagtagtaggttgaggccgttgagcaccgccgccgcaaggaatggtgcatgcaaggagatggcgcccaacagtcccccggccacggggcctgccaccatacccacgccgaaacaagcgctcatgagcccgaagtggcgagcccgatcttccccatcggtgatgtcggcgatataggcgccagcaaccgcacctgtggcgccggtgatgccggccacgatgcgtccggcgtagaggatcgagatctcgatcccgcgaaattaatacgactcactataggggaattgtgagcggataacaattcccctctagaaataattttgtttaactttaagaaggagatatacatatgccttactccagtgagtcgaaggaaaaagaaacacactcaaaagaaaccgaaagagatatgccgaaaccggcggtggagagcgagttcagcaaggttctgaagaaacacttcccgggcgagcgttttcgtagcagctacatgaaacgtggtggcaagatcctggcggcgcaaggcgaggaagcggtggttgcgtatctgcagggcaaaagcgaggaagagccgccgaacttccaaccgccggcgaaatgccacgtggttaccaagagccgtgactttgcggagtggccgattatgaaggcgagcgaagcgatccagcgttacatttatgcgctgagcaccaccgagcgtgcggcgtgcaaaccgggcaagagcagcgaaagccatgcggcgtggtttgcggcgaccggcgtgagcaaccacggctacagccacgttcaaggcctgaacctgatctttgaccacaccctgggtcgttatgatggcgtgctgaagaaagttcagctgcgtaacgagaaagcgcgtgcgcgtctggaaagcatcaacgcgagccgtgcggatgagggtctgccggaaattaaggcggaagaggaagaggtggcgaccaacgaaaccggccacctgctgcagccgccgggtatcaacccgagcttttacgtttatcaaaccattagcccgcaggcgtaccgtccgcgtgacgagattgtgctgccgccggaatacgcgggttatgttcgtgatccgaacgcgccgattccgctgggcgtggttcgtaaccgttgcgacatccaaaaaggttgcccgggctacattccggagtggcagcgtgaagcgggtaccgcgatcagcccgaaaaccggcaaggcggtgaccgttccgggtctgagcccgaagaaaaacaagcgtatgcgtcgttattggcgtagcgagaaagaaaaggcgcaagatgcgctgctggtgaccgttcgtatcggtaccgactgggtggttattgatgttcgtggcctgctgcgtaacgcgcgttggcgtaccatcgcgccgaaagacattagcctgaacgcgctgctggacctgttcaccggcgacccggtgatcgatgttcgtcgtaacattgttacctttacctacaccctggacgcgtgcggtacctatgcgcgtaagtggaccctgaaaggcaagcagaccaaagcgaccctggacaagctgaccgcgacccaaaccgtggcgctggttgcgatcgatctgggtcagaccaacccgatcagcgcgggcattagccgtgtgacccaagagaacggtgcgctgcagtgcgaaccgctggaccgtttcaccctgccggacgatctgctgaaagacatcagcgcgtaccgtattgcgtgggatcgtaacgaagaggaactgcgtgcgcgtagcgttgaggcgctgccggaagcgcagcaagcggaagtgcgtgcgctggatggtgttagcaaggaaaccgcgcgtacccaactgtgcgcggacttcggtctggacccgaaacgtctgccgtgggacaagatgagcagcaacaccacctttatcagcgaggcgctgctgagcaacagcgtgagccgtgatcaggttttctttaccccggcgccgaagaaaggtgcgaagaaaaaggcgccggtggaagttatgcgtaaagaccgtacctgggcgcgtgcgtataagccgcgtctgagcgtggaggcgcagaaactgaagaacgaagcgctgtgggcgctgaaacgtaccagcccggagtacctgaaactgagccgtcgtaaagaggagctgtgccgtcgtagcatcaactatgtgattgagaagacccgtcgtcgtacccagtgccaaatcgtgattccggttattgaagacctgaacgttcgtttctttcacggtagcggcaaacgtctgccgggttgggataacttctttaccgcgaaaaaggaaaaccgttggttcatccaaggcctgcacaaggcgtttagcgacctgcgtacccaccgtagcttctacgtgtttgaggttcgtccggaacgtaccagcattacctgcccgaaatgcggtcactgcgaggttggtaaccgtgatggcgaagcgttccagtgcctgagctgcggcaagacctgcaacgcggacctggatgtggcgacccacaacctgacccaagttgcgctgaccggcaaaaccatgccgaagcgtgaggaaccgcgtgacgcgcagggtaccgcgccggcgcgtaaaaccaaaaaggcgagcaaaagcaaggctccgccggcggagcgtgaagatcaaaccccggcgcaagagccgagccagaccagctaaggtacccttgaggtgctgtttcagggaccaggaggtagtggatctgcttggagccatccacagttcgaaaaaggtggaggttctggcggtggatcaggtggaagtgcatggtctcaccctcagtttgagaaataaggatccggctgctaacaaagcccgaaaggaagctgagttggctgctgccaccgctgagcaataactagcataaccccttggggcctctaaacgggtcttgaggggttttttgctgaaaggaggaactatatccggatatcccgcaagaggcccggcagtaccggcataaccaagcctatgcctacagcatccagggtgacggtgccgaggatgacgatgagcgcattgttagatttcatacacggtgcctgactgcgttagcaatttaactgtgataaactaccgcattaaagcttatcgatgataagctgtcaaacatgagaattcttgaagacgaaagggcctcgtgatacgcctatttttataggttaatgtcatgataataatggtttcttagacgtcaggtggcacttttcggggaaatgtgcgcggaacccctatttgtttatttttctaaatacattcaaatatgtatccgctcatgagacaataaccctgataaatgcttcaataatattgaaaaaggaagagtatgagtattcaacatttccgtgtcgcccttattcccttttttgcggcattttgccttcctgtttttgctcacccagaaacgctggtgaaagtaaaagatgctgaagatcagttgggtgcacgagtgggttacatcgaactggatctcaacagcggtaagatccttgagagttttcgccccgaagaacgttttccaatgatgagcacttttaaagttctgctatgtggcgcggtattatcccgtgttgacgccgggcaagagcaactcggtcgccgcatacactattctcagaatgacttggttgagtactcaccagtcacagaaaagcatcttacggatggcatgacagtaagagaattatgcagtgctgccataaccatgagtgataacactgcggccaacttacttctgacaacgatcggaggaccgaaggagctaaccgcttttttgcacaacatgggggatcatgtaactcgccttgatcgttgggaaccggagctgaatgaagccataccaaacgacgagcgtgacaccacgatgcctgcagcaatggcaacaacgttgcgcaaactattaactggcgaactacttactctagcttcccggcaacaattaatagactggatggaggcggataaagttgcaggaccacttctgcgctcggcccttccggctggctggtttattgctgataaatctggagccggtgagcgtgggtctcgcggtatcattgcagcactggggccagatggtaagccctcccgtatcgtagttatctacacgacggggagtcaggcaactatggatgaacgaaatagacagatcgctgagataggtgcctcactgattaagcattggtaactgtcagaccaagtttactcatatatactttagattgatttaaaacttcatttttaatttaaaaggatctaggtgaagatcctttttgataatctcatgaccaaaatcccttaacgtgagttttcgttccactgagcgtcagaccccgtagaaaagatcaaaggatcttcttgagatcctttttttctgcgcgtaatctgctgcttgcaaacaaaaaaaccaccgctaccagcggtggtttgtttgccggatcaagagctaccaactctttttccgaaggtaactggcttcagcagagcgcagataccaaatactgtccttctagtgtagccgtagttaggccaccacttcaagaactctgtagcaccgcctacatacctcgctctgctaatcctgttaccagtggctgctgccagtggcgataagtcgtgtcttaccgggttggactcaagacgatagttaccggataaggcgcagcggtcgggctgaacggggggttcgtgcacacagcccagcttggagcgaacgacctacaccgaactgagatacctacagcgtgagctatgagaaagcgccacgcttcccgaagggagaaaggcggacaggtatccggtaagcggcagggtcggaacaggagagcgcacgagggagcttccagggggaaacgcctggtatctttatagtcctgtcgggtttcgccacctctgacttgagcgtcgatttttgtgatgctcgtcaggggggcggagcctatggaaaaacgccagcaacgcggcctttttacggttcctggccttttgctggccttttgctcacatgttctttcctgcgttatcccctgattctgtggataaccgtattaccgcctttgagtgagctgataccgctcgccgcagccgaacgaccgagcgcagcgagtcagtgagcgaggaagcggaagagcgcctgatgcggtattttctccttacgcatctgtgcggtatttcacaccgcatatatggtgcactctcagtacaatctgctctgatgccgcatagttaagccagtatacactccgctatcgctacgtgactgggtcatggctgcgccccgacacccgccaacacccgctgacgcgccctgacgggcttgtctgctcccggcatccgcttacagacaagctgtgaccgtctccgggagctgcatgtgtcagaggttttcaccgtcatcaccgaaacgcgcgaggcagctgcggtaaagctcatcagcgtggtcgtgaagcgattcacagatgtctgcctgttcatccgcgtccagctcgttgagtttctccagaagcgttaatgtctggcttctgataaagcgggccatgttaagggcggttttttcctgtttggtcactgatgcctccgtgtaagggggatttctgttcatgggggtaatgataccgatgaaacgagagaggatgctcacgatacgggttactgatgatgaacatgcccggttactggaacgttgtgagggtaaacaactggcggtatggatgcggcgggaccagagaaaaatcactcagggtcaatgccagcgcttcgttaatacagatgtaggtgttccacagggtagccagcagcatcctgcgatgcagatccggaacataatggtgcagggcgctgacttccgcgtttccagactttacgaaacacggaaaccgaagaccattcatgttgttgctcaggtcgcagacgttttgcagcagcagtcgcttcacgttcgctcgcgtatcggtgattcattctgctaaccagtaaggcaaccccgccagcctagccgggtcctcaacgacaggagcacgatcatgcgcacccgtggccaggacccaacgctgcccgagatgcgccgcgtgcggctgctggagatggcggacgcgatggatatgttctgccaagggttggtttgcgcattcacagttctccgcaagaattgattggctccaattcttggagtggtgaatccgttagcgaggtgccgccggcttccattcaggtcgaggtggcccggctccatgcaccgcgacgcaacgcggggaggcagacaaggtatagggcggcgcctacaatccatgccaacccgttccatgtgctcgccgaggcggcataaatcgccgtgacgatcagcggtccagtgatcgaagttaggctggtaagagccgcgagcgatccttgaagctgtccctgatggtcgtcatctacctgcctggacagcatggcctgcaacgcgggcatcccgatgccgccggaagcgagaagaatcataatggggaaggccatccagcctcgcgtcgcgaacgccagcaagacgtagcccagcgcgtcggccgccatgccggcgataatggcctgcttctcgccgaaacgtttggtggcgggaccagtgacgaaggcttgagcgagggcgtgcaagattccgaataccgcaagcgacaggccgatcatcgtcgcgctccagcgaaagcggtcctcgccgaaaatgacccagagcgctgccggcacctgtcctacgagttgcatgataaagaagacagtcataagtgcggcgacgatagtcatgccccgcgcccaccggaaggagctgactgggttgaaggctctcaagggcatcggtcgagatcccggtgcctaatgagtgagctaacttacattaattgcgttgcgctcactgcccgctttccagtcgggaaacctgtcgtgccagctgcattaatgaatcggccaacgcgcggggagaggcggtttgcgtattgggcgccagggtggtttttcttttcaccagtgagacgggcaacagctgattgcccttcaccgcctggccctgagagagttgcagcaagcggtccacgctggtttgccccagcaggcgaaaatcctgtttgatggtggttaacggcgggatataacatgagctgtcttcggtatcgtcgtatcccactaccgagatatccgcaccaacgcgcagcccggactcggtaatggcgcgcattgcgcccagcgccatctgatcgttggcaaccagcatcgcagtgggaacgatgccctcattcagcatttgcatggtttgttgaaaaccggacatggcactccagtcgccttcccgttccgctatcggctgaatttgattgcgagtgagatatttatgccagccagccagacgcagacgcgccgagacagaacttaatgggcccgctaacagcgcgatttgctggtgacccaatgcgaccagatgctccacgcccagtcgcgtaccgtcttcatgggagaaaataatactgttgatgggtgtc

SEQ ID NO: 104 - protein, 20 aa, Serratia entomophila
MPYSSESKEKETHSKETERD

SEQ ID NO: 105 - protein, 757 aa, Serratia entomophila; identical to SEQ ID NO: 99

SEQ ID NO: 106 - DNA, 8083 bp, Serratia entomophila
  source 1..8083: mol_type = other DNA
  CDS 933..965: note = Afp18-NT11
  CDS 966..3239: note = Casphi2 codon optimized
tggtcagagacatcaagaaataacgccggaacattagtgcaggcagcttccacagcaatggcatcctggtcatccagcggatagttaatgatcagcccactgacgcgttgcgcgagaagattgtgcaccgccgctttacaggcttcgacgccgcttcgttctaccatcgacaccaccacgctggcacccagttgatcggcgcgagatttaatcgccgcgacaatttgcgacggcgcgtgcagggccagactggaggtggcaacgccaatcagcaacgactgtttgcccgccagttgttgtgccacgcggttgggaatgtaattcagctccgccatcgccgcttccactttttcccgcgttttcgcagaaacgtggctggcctggttcaccacgcgggaaacggtctgataagagacaccggcatactctgcgacatcgtataacgttactggtttcacattcaccaccctgaattgactctcttccgggcgctatcatgccataccgcgaaaggttttgcgccattcgatggtgtccgggatctcgacgctctcccttatgcgactcctgcattaggaagcagcccagtagtaggttgaggccgttgagcaccgccgccgcaaggaatggtgcatgcaaggagatggcgcccaacagtcccccggccacggggcctgccaccatacccacgccgaaacaagcgctcatgagcccgaagtggcgagcccgatcttccccatcggtgatgtcggcgatataggcgccagcaaccgcacctgtggcgccggtgatgccggccacgatgcgtccggcgtagaggatcgagatctcgatcccgcgaaattaatacgactcactataggggaattgtgagcggataacaattcccctctagaaataattttgtttaactttaagaaggagatatacatatgccttactccagtgagtcgaaggaaaaagaaatgccgaaaccggcggtggagagcgagttcagcaaggttctgaagaaacacttcccgggcgagcgttttcgtagcagctacatgaaacgtggtggcaagatcctggcggcgcaaggcgaggaagcggtggttgcgtatctgcagggcaaaagcgaggaagagccgccgaacttccaaccgccggcgaaatgccacgtggttaccaagagccgtgactttgcggagtggccgattatgaaggcgagcgaagcgatccagcgttacatttatgcgctgagcaccaccgagcgtgcggcgtgcaaaccgggcaagagcagcgaaagccatgcggcgtggtttgcggcgaccggcgtgagcaaccacggctacagccacgttcaaggcctgaacctgatctttgaccacaccctgggtcgttatgatggcgtgctgaagaaagttcagctgcgtaacgagaaagcgcgtgcgcgtctggaaagcatcaacgcgagccgtgcggatgagggtctgccggaaattaaggcggaagaggaagaggtggcgaccaacgaaaccggccacctgctgcagccgccgggtatcaacccgagcttttacgtttatcaaaccattagcccgcaggcgtaccgtccgcgtgacgagattgtgctgccgccggaatacgcgggttatgttcgtgatccgaacgcgccgattccgctgggcgtggttcgtaaccgttgcgacatccaaaaaggttgcccgggctacattccggagtggcagcgtgaagcgggtaccgcgatcagcccgaaaaccggcaaggcggtgaccgttccgggtctgagcccgaagaaaaacaagcgtatgcgtcgttattggcgtagcgagaaagaaaaggcgcaagatgcgctgctggtgaccgttcgtatcggtaccgactgggtggttattgatgttcgtggcctgctgcgtaacgcgcgttggcgtaccatcgcgccgaaagacattagcctgaacgcgctgctggacctgttcaccggcgacccggtgatcgatgttcgtcgtaacattgttacctttacctacaccctggacgcgtgcggtacctatgcgcgtaagtggaccctgaaaggcaagcagaccaaagcgaccctggacaagctgaccgcgacccaaaccgtggcgctggttgcgatcgatctgggtcagaccaacccgatcagcgcgggcattagccgtgtgacccaagagaacggtgcgctgcagtgcgaaccgctggaccgtttcaccctgccggacgatctgctgaaagacatcagcgcgtaccgtattgcgtgggatcgtaacgaagaggaactgcgtgcgcgtagcgttgaggcgctgccggaagcgcagcaagcggaagtgcgtgcgctggatggtgttagcaaggaaaccgcgcgtacccaactgtgcgcggacttcggtctggacccgaaacgtctgccgtgggacaagatgagcagcaacaccacctttatcagcgaggcgctgctgagcaacagcgtgagccgtgatcaggttttctttaccccggcgccgaagaaaggtgcgaagaaaaaggcgccggtggaagttatgcgtaaagaccgtacctgggcgcgtgcgtataagccgcgtctgagcgtggaggcgcagaaactgaagaacgaagcgctgtgggcgctgaaacgtaccagcccggagtacctgaaactgagccgtcgtaaagaggagctgtgccgtcgtagcatcaactatgtgattgagaagacccgtcgtcgtacccagtgccaaatcgtgattccggttattgaagacctgaacgttcgtttctttcacggtagcggcaaacgtctgccgggttgggataacttctttaccgcgaaaaaggaaaaccgttggttcatccaaggcctgcacaaggcgtttagcgacctgcgtacccaccgtagcttctacgtgtttgaggttcgtccggaacgtaccagcattacctgcccgaaatgcggtcactgcgaggttggtaaccgtgatggcgaagcgttccagtgcctgagctgcggcaagacctgcaacgcggacctggatgtggcgacccacaacctgacccaagttgcgctgaccggcaaaaccatgccgaagcgtgaggaaccgcgtgacgcgcagggtaccgcgccggcgcgtaaaaccaaaaaggcgagcaaaagcaaggctccgccggcggagcgtgaagatcaaaccccggcgcaagagccgagccagaccagctaaggtacccttgaggtgctgtttcagggaccaggaggtagtggatctgcttggagccatccacagttcgaaaaaggtggaggttctggcggtggatcaggtggaagtgcatggtctcaccctcagtttgagaaataaggatccggctgctaacaaagcccgaaaggaagctgagttggctgctgccaccgctgagcaataactagcataaccccttggggcctctaaacgggtcttgaggggttttttgctgaaaggaggaactatatccggatatcccgcaagaggcccggcagtaccggcataaccaagcctatgcctacagcatccagggtgacggtgccgaggatgacgatgagcgcattgttagatttcatacacggtgcctgactgcgttagcaatttaactgtgataaactaccgcattaaagcttatcgatgataagctgtcaaacatgagaattcttgaagacgaaagggcctcgtgatacgcctatttttataggttaatgtcatgataataatggtttcttagacgtcaggtggcacttttcggggaaatgtgcgcggaacccctatttgtttatttttctaaatacattcaaatatgtatccgctcatgagacaataaccctgataaatgcttcaataatattgaaaaaggaagagtatgagtattcaacatttccgtgtcgcccttattcccttttttgcggcattttgccttcctgtttttgctcacccagaaacgctggtgaaagtaaaagatgctgaagatcagttgggtgcacgagtgggttacatcgaactggatctcaacagcggtaagatccttgagagttttcgccccgaagaacgttttccaatgatgagcacttttaaagttctgctatgtggcgcggtattatcccgtgttgacgccgggcaagagcaactcggtcgccgcatacactattctcagaatgacttggttgagtactcaccagtcacagaaaagcatcttacggatggcatgacagtaagagaattatgcagtgctgccataaccatgagtgataacactgcggccaacttacttctgacaacgatcggaggaccgaaggagctaaccgcttttttgcacaacatgggggatcatgtaactcgccttgatcgttgggaaccggagctgaatgaagccataccaaacgacgagcgtgacaccacgatgcctgcagcaatggcaacaacgttgcgcaaactattaactggcgaactacttactctagcttcccggcaacaattaatagactggatggaggcggataaagttgcaggaccacttctgcgctcggcccttccggctggctggtttattgctgataaatctggagccggtgagcgtgggtctcgcggtatcattgcagcactggggccagatggtaagccctcccgtatcgtagttatctacacgacggggagtcaggcaactatggatgaacgaaatagacagatcgctgagataggtgcctcactgattaagcattggtaactgtcagaccaagtttactcatatatactttagattgatttaaaacttcatttttaatttaaaaggatctaggtgaagatcctttttgataatctcatgaccaaaatcccttaacgtgagttttcgttccactgagcgtcagaccccgtagaaaagatcaaaggatcttcttgagatcctttttttctgcgcgtaatctgctgcttgcaaacaaaaaaaccaccgctaccagcggtggtttgtttgccggatcaagagctaccaactctttttccgaaggtaactggcttcagcagagcgcagataccaaatactgtccttctagtgtagccgtagttaggccaccacttcaagaactctgtagcaccgcctacatacctcgctctgctaatcctgttaccagtggctgctgccagtggcgataagtcgtgtcttaccgggttggactcaagacgatagttaccggataaggcgcagcggtcgggctgaacggggggttcgtgcacacagcccagcttggagcgaacgacctacaccgaactgagatacctacagcgtgagctatgagaaagcgccacgcttcccgaagggagaaaggcggacaggtatccggtaagcggcagggtcggaacaggagagcgcacgagggagcttccagggggaaacgcctggtatctttatagtcctgtcgggtttcgccacctctgacttgagcgtcgatttttgtgatgctcgtcaggggggcggagcctatggaaaaacgccagcaacgcggcctttttacggttcctggccttttgctggccttttgctcacatgttctttcctgcgttatcccctgattctgtggataaccgtattaccgcctttgagtgagctgataccgctcgccgcagccgaacgaccgagcgcagcgagtcagtgagcgaggaagcggaagagcgcctgatgcggtattttctccttacgcatctgtgcggtatttcacaccgcatatatggtgcactctcagtacaatctgctctgatgccgcatagttaagccagtatacactccgctatcgctacgtgactgggtcatggctgcgccccgacacccgccaacacccgctgacgcgccctgacgggcttgtctgctcccggcatccgcttacagacaagctgtgaccgtctccgggagctgcatgtgtcagaggttttcaccgtcatcaccgaaacgcgcgaggcagctgcggtaaagctcatcagcgtggtcgtgaagcgattcacagatgtctgcctgttcatccgcgtccagctcgttgagtttctccagaagcgttaatgtctggcttctgataaagcgggccatgttaagggcggttttttcctgtttggtcactgatgcctccgtgtaagggggatttctgttcatgggggtaatgataccgatgaaacgagagaggatgctcacgatacgggttactgatgatgaacatgcccggttactggaacgttgtgagggtaaacaactggcggtatggatgcggcgggaccagagaaaaatcactcagggtcaatgccagcgcttcgttaatacagatgtaggtgttccacagggtagccagcagcatcctgcgatgcagatccggaacataatggtgcagggcgctgacttccgcgtttccagactttacgaaacacggaaaccgaagaccattcatgttgttgctcaggtcgcagacgttttgcagcagcagtcgcttcacgttcgctcgcgtatcggtgattcattctgctaaccagtaaggcaaccccgccagcctagccgggtcctcaacgacaggagcacgatcatgcgcacccgtggccaggacccaacgctgcccgagatgcgccgcgtgcggctgctggagatggcggacgcgatggatatgttctgccaagggttggtttgcgcattcacagttctccgcaagaattgattggctccaattcttggagtggtgaatccgttagcgaggtgccgccggcttccattcaggtcgaggtggcccggctccatgcaccgcgacgcaacgcggggaggcagacaaggtatagggcggcgcctacaatccatgccaacccgttccatgtgctcgccgaggcggcataaatcgccgtgacgatcagcggtccagtgatcgaagttaggctggtaagagccgcgagcgatccttgaagctgtccctgatggtcgtcatctacctgcctggacagcatggcctgcaacgcgggcatcccgatgccgccggaagcgagaagaatcataatggggaaggccatccagcctcgcgtcgcgaacgccagcaagacgtagcccagcgcgtcggccgccatgccggcgataatggcctgcttctcgccgaaacgtttggtggcgggaccagtgacgaaggcttgagcgagggcgtgcaagattccgaataccgcaagcgacaggccgatcatcgtcgcgctccagcgaaagcggtcctcgccgaaaatgacccagagcgctgccggcacctgtcctacgagttgcatgataaagaagacagtcataagtgcggcgacgatagtcatgccccgcgcccaccggaaggagctgactgggttgaaggctctcaagggcatcggtcgagatcccggtgcctaatgagtgagctaacttacattaattgcgttgcgctcactgcccgctttccagtcgggaaacctgtcgtgccagctgcattaatgaatcggccaacgcgcggggagaggcggtttgcgtattgggcgccagggtggtttttcttttcaccagtgagacgggcaacagctgattgcccttcaccgcctggccctgagagagttgcagcaagcggtccacgctggtttgccccagcaggcgaaaatcctgtttgatggtggttaacggcgggatataacatgagctgtcttcggtatcgtcgtatcccactaccgagatatccgcaccaacgcgcagcccggactcggtaatggcgcgcattgcgcccagcgccatctgatcgttggcaaccagcatcgcagtgggaacgatgccctcattcagcatttgcatggtttgttgaaaaccggacatggcactccagtcgccttcccgttccgctatcggctgaatttgattgcgagtgagatatttatgccagccagccagacgcagacgcgccgagacagaacttaatgggcccgctaacagcgcgatttgctggtgacccaatgcgaccagatgctccacgcccagtcgcgtaccgtcttcatgggagaaaataatactgttgatgggtgtc

SEQ ID NO: 107 - protein, 11 aa, Serratia entomophila
MPYSSESKEKE

SEQ ID NO: 108 - protein, 757 aa, Serratia entomophila; identical to SEQ ID NO: 99

SEQ ID NO: 109 - DNA, 8065 bp, Serratia entomophila
  source 1..8065: mol_type = other DNA
  CDS 933..947: note = Afp18-NT5
  CDS 948..3221: note = Casphi2 codon optimized
tggtcagagacatcaagaaataacgccggaacattagtgcaggcagcttccacagcaatggcatcctggtcatccagcggatagttaatgatcagcccactgacgcgttgcgcgagaagattgtgcaccgccgctttacaggcttcgacgccgcttcgttctaccatcgacaccaccacgctggcacccagttgatcggcgcgagatttaatcgccgcgacaatttgcgacggcgcgtgcagggccagactggaggtggcaacgccaatcagcaacgactgtttgcccgccagttgttgtgccacgcggttgggaatgtaattcagctccgccatcgccgcttccactttttcccgcgttttcgcagaaacgtggctggcctggttcaccacgcgggaaacggtctgataagagacaccggcatactctgcgacatcgtataacgttactggtttcacattcaccaccctgaattgactctcttccgggcgctatcatgccataccgcgaaaggttttgcgccattcgatggtgtccgggatctcgacgctctcccttatgcgactcctgcattaggaagcagcccagtagtaggttgaggccgttgagcaccgccgccgcaaggaatggtgcatgcaaggagatggcgcccaacagtcccccggccacggggcctgccaccatacccacgccgaaacaagcgctcatgagcccgaagtggcgagcccgatcttccccatcggtgatgtcggcgatataggcgccagcaaccgcacctgtggcgccggtgatgccggccacgatgcgtccggcgtagaggatcgagatctcgatcccgcgaaattaatacgactcactataggggaattgtgagcggataacaattcccctctagaaataattttgtttaactttaagaaggagatatacatatgccttactccagtatgccgaaaccggcggtggagagcgagttcagcaaggttctgaagaaacacttcccgggcgagcgttttcgtagcagctacatgaaacgtggtggcaagatcctggcggcgcaaggcgaggaagcggtggttgcgtatctgcagggcaaaagcgaggaagagccgccgaacttccaaccgccggcgaaatgccacgtggttaccaagagccgtgactttgcggagtggccgattatgaaggcgagcgaagcgatccagcgttacatttatgcgctgagcaccaccgagcgtgcggcgtgcaaaccgggcaagagcagcgaaagccatgcggcgtggtttgcggcgaccggcgtgagcaaccacggctacagccacgttcaaggcctgaacctgatctttgaccacaccctgggtcgttatgatggcgtgctgaagaaagttcagctgcgtaacgagaaagcgcgtgcgcgtctggaaagcatcaacgcgagccgtgcggatgagggtctgccggaaattaaggcggaagaggaagaggtggcgaccaacgaaaccggccacctgctgcagccgccgggtatcaacccgagcttttacgtttatcaaaccattagcccgcaggcgtaccgtccgcgtgacgagattgtgctgccgccggaatacgcgggttatgttcgtgatccgaacgcgccgattccgctgggcgtggttcgtaaccgttgcgacatccaaaaaggttgcccgggctacattccggagtggcagcgtgaagcgggtaccgcgatcagcccgaaaaccggcaaggcggtgaccgttccgggtctgagcccgaagaaaaacaagcgtatgcgtcgttattggcgtagcgagaaagaaaaggcgcaagatgcgctgctggtgaccgttcgtatcggtaccgactgggtggttattgatgttcgtggcctgctgcgtaacgcgcgttggcgtaccatcgcgccgaaagacattagcctgaacgcgctgctggacctgttcaccggcgacccggtgatcgatgttcgtcgtaacattgttacctttacctacaccctggacgcgtgcggtacctatgcgcgtaagtggaccctgaaaggcaagcagaccaaagcgaccctggacaagctgaccgcgacccaaaccgtggcgctggttgcgatcgatctgggtcagaccaacccgatcagcgcgggcattagccgtgtgacccaagagaacggtgcgctgcagtgcgaaccgctggaccgtttcaccctgccggacgatctgctgaaagacatcagcgcgtaccgtattgcgtgggatcgtaacgaagaggaactgcgtgcgcgtagcgttgaggcgctgccggaagcgcagcaagcggaagtgcgtgcgctggatggtgttagcaaggaaaccgcgcgtacccaactgtgcgcggacttcggtctggacccgaaacgtctgccgtgggacaagatgagcagcaacaccacctttatcagcgaggcgctgctgagcaacagcgtgagccgtgatcaggttttctttaccccggcgccgaagaaaggtgcgaagaaaaaggcgccggtggaagttatgcgtaaagaccgtacctgggcgcgtgcgtataagccgcgtctgagcgtggaggcgcagaaactgaagaacgaagcgctgtgggcgctgaaacgtaccagcccggagtacctgaaactgagccgtcgtaaagaggagctgtgccgtcgtagcatcaactatgtgattgagaagacccgtcgtcgtacccagtgccaaatcgtgattccggttattgaagacctgaacgttcgtttctttcacggtagcggcaaacgtctgccgggttgggataacttctttaccgcgaaaaaggaaaaccgttggttcatccaaggcctgcacaaggcgtttagcgacctgcgtacccaccgtagcttctacgtgtttgaggttcgtccggaacgtaccagcattacctgcccgaaatgcggtcactgcgaggttggtaaccgtgatggcgaagcgttccagtgcctgagctgcggcaagacctgcaacgcggacctggatgtggcgacccacaacctgacccaagttgcgctgaccggcaaaaccatgccgaagcgtgaggaaccgcgtgacgcgcagggtaccgcgccggcgcgtaaaaccaaaaaggcgagcaaaagcaaggctccgccggcggagcgtgaagatcaaaccccggcgcaagagccgagccagaccagctaaggtacccttgaggtgctgtttcagggaccaggaggtagtggatctgcttggagccatccacagttcgaaaaaggtggaggttctggcggtggatcaggtggaagtgcatggtctcaccctcagtttgagaaataaggatccggctgctaacaaagcccgaaaggaagctgagttggctgctgccaccgctgagcaataactagcataaccccttggggcctctaaacgggtcttgaggggttttttgctgaaaggaggaactatatccggatatcccgcaagaggcccggcagtaccggcataaccaagcctatgcctacagcatccagggtgacggtgccgaggatgacgatgagcgcattgttagatttcatacacggtgcctgactgcgttagcaatttaactgtgataaactaccgcattaaagcttatcgatgataagctgtcaaacatgagaattcttgaagacgaaagggcctcgtgatacgcctatttttataggttaatgtcatgataataatggtttcttagacgtcaggtggcacttttcggggaaatgtgcgcggaacccctatttgtttatttttctaaatacattcaaatatgtatccgctcatgagacaataaccctgataaatgcttcaataatattgaaaaaggaagagtatgagtattcaacatttccgtgtcgcccttattcccttttttgcggcattttgccttcctgtttttgctcacccagaaacgctggtgaaagtaaaagatgctgaagatcagttgggtgcacgagtgggttacatcgaactggatctcaacagcggtaagatccttgagagttttcgccccgaagaacgttttccaatgatgagcacttttaaagttctgctatgtggcgcggtattatcccgtgttgacgccgggcaagagcaactcggtcgccgcatacactattctcagaatgacttggttgagtactcaccagtcacagaaaagcatcttacggatggcatgacagtaagagaattatgcagtgctgccataaccatgagtgataacactgcggccaacttacttctgacaacgatcggaggaccgaaggagctaaccgcttttttgcacaacatgggggatcatgtaactcgccttgatcgttgggaaccggagctgaatgaagccataccaaacgacgagcgtgacaccacgatgcctgcagcaatggcaacaacgttgcgcaaactattaactggcgaactacttactctagcttcccggcaacaattaatagactggatggaggcggataaagttgcaggaccacttctgcgctcggcccttccggctggctggtttattgctgataaatctggagccggtgagcgtgggtctcgcggtatcattgcagcactggggccagatggtaagccctcccgtatcgtagttatctacacgacggggagtcaggcaactatggatgaacgaaatagacagatcgctgagataggtgcctcactgattaagcattggtaactgtcagaccaagtttactcatatatactttagattgatttaaaacttcatttttaatttaaaaggatctaggtgaagatcctttttgataatctcatgaccaaaatcccttaacgtgagttttcgttccactgagcgtcagaccccgtagaaaagatcaaaggatcttcttgagatcctttttttctgcgcgtaatctgctgcttgcaaacaaaaaaaccaccgctaccagcggtggtttgtttgccggatcaagagctaccaactctttttccgaaggtaactggcttcagcagagcgcagataccaaatactgtccttctagtgtagccgtagttaggccaccacttcaagaactctgtagcaccgcctacatacctcgctctgctaatcctgttaccagtggctgctgccagtggcgataagtcgtgtcttaccgggttggactcaagacgatagttaccggataaggcgcagcggtcgggctgaacggggggttcgtgcacacagcccagcttggagcgaacgacctacaccgaactgagatacctacagcgtgagctatgagaaagcgccacgcttcccgaagggagaaaggcggacaggtatccggtaagcggcagggtcggaacaggagagcgcacgagggagcttccagggggaaacgcctggtatctttatagtcctgtcgggtttcgccacctctgacttgagcgtcgatttttgtgatgctcgtcaggggggcggagcctatggaaaaacgccagcaacgcggcctttttacggttcctggccttttgctggccttttgctcacatgttctttcctgcgttatcccctgattctgtggataaccgtattaccgcctttgagtgagctgataccgctcgccgcagccgaacgaccgagcgcagcgagtcagtgagcgaggaagcggaagagcgcctgatgcggtattttctccttacgcatctgtgcggtatttcacaccgcatatatggtgcactctcagtacaatctgctctgatgccgcatagttaagccagtatacactccgctatcgctacgtgactgggtcatggctgcgccccgacacccgccaacacccgctgacgcgccctgacgggcttgtctgctcccggcatccgcttacagacaagctgtgaccgtctccgggagctgcatgtgtcagaggttttcaccgtcatcaccgaaacgcgcgaggcagctgcggtaaagctcatcagcgtggtcgtgaagcgattcacagatgtctgcctgttcatccgcgtccagctcgttgagtttctccagaagcgttaatgtctggcttctgataaagcgggccatgttaagggcggttttttcctgtttggtcactgatgcctccgtgtaagggggatttctgttcatgggggtaatgataccgatgaaacgagagaggatgctcacgatacgggttactgatgatgaacatgcccggttactggaacgttgtgagggtaaacaactggcggtatggatgcggcgggaccagagaaaaatcactcagggtcaatgccagcgcttcgttaatacagatgtaggtgttccacagggtagccagcagcatcctgcgatgcagatccggaacataatggtgcagggcgctgacttccgcgtttccagactttacgaaacacggaaaccgaagaccattcatgttgttgctcaggtcgcagacgttttgcagcagcagtcgcttcacgttcgctcgcgtatcggtgattcattctgctaaccagtaaggcaaccccgccagcctagccgggtcctcaacgacaggagcacgatcatgcgcacccgtggccaggacccaacgctgcccgagatgcgccgcgtgcggctgctggagatggcggacgcgatggatatgttctgccaagggttggtttgcgcattcacagttctccgcaagaattgattggctccaattcttggagtggtgaatccgttagcgaggtgccgccggcttccattcaggtcgaggtggcccggctccatgcaccgcgacgcaacgcggggaggcagacaaggtatagggcggcgcctacaatccatgccaacccgttccatgtgctcgccgaggcggcataaatcgccgtgacgatcagcggtccagtgatcgaagttaggctggtaagagccgcgagcgatccttgaagctgtccctgatggtcgtcatctacctgcctggacagcatggcctgcaacgcgggcatcccgatgccgccggaagcgagaagaatcataatggggaaggccatccagcctcgcgtcgcgaacgccagcaagacgtagcccagcgcgtcggccgccatgccggcgataatggcctgcttctcgccgaaacgtttggtggcgggaccagtgacgaaggcttgagcgagggcgtgcaagattccgaataccgcaagcgacaggccgatcatcgtcgcgctccagcgaaagcggtcctcgccgaaaatgacccagagcgctgccggcacctgtcctacgagttgcatgataaagaagacagtcataagtgcggcgacgatagtcatgccccgcgcccaccggaaggagctgactgggttgaaggctctcaagggcatcggtcgagatcccggtgcctaatgagtgagctaacttacattaattgcgttgcgctcactgcccgctttccagtcgggaaacctgtcgtgccagctgcattaatgaatcggccaacgcgcggggagaggcggtttgcgtattgggcgccagggtggtttttcttttcaccagtgagacgggcaacagctgattgcccttcaccgcctggccctgagagagttgcagcaagcggtccacgctggtttgccccagcaggcgaaaatcctgtttgatggtggttaacggcgggatataacatgagctgtcttcggtatcgtcgtatcccactaccgagatatccgcaccaacgcgcagcccggactcggtaatggcgcgcattgcgcccagcgccatctgatcgttggcaaccagcatcgcagtgggaacgatgccctcattcagcatttgcatggtttgttgaaaaccggacatggcactccagtcgccttcccgttccgctatcggctgaatttgattgcgagtgagatatttatgccagccagccagacgcagacgcgccgagacagaacttaatgggcccgctaacagcgcgatttgctggtgacccaatgcgaccagatgctccacgcccagtcgcgtaccgtcttcatgggagaaaataatactgttgatgggtgtc

SEQ ID NO: 110 - protein, 5 aa, Serratia entomophila
MPYSS

SEQ ID NO: 111 - protein, 757 aa, Serratia entomophila; identical to SEQ ID NO: 99

SEQ ID NO: 112 - DNA, 8056 bp, Serratia entomophila
  source 1..8056: mol_type = other DNA
  CDS 933..938: note = Afp18-NT2
  CDS 939..3212: note = Casphi2 codon optimized
tggtcagagacatcaagaaataacgccggaacattagtgcaggcagcttccacagcaatggcatcctggtcatccagcggatagttaatgatcagcccactgacgcgttgcgcgagaagattgtgcaccgccgctttacaggcttcgacgccgcttcgttctaccatcgacaccaccacgctggcacccagttgatcggcgcgagatttaatcgccgcgacaatttgcgacggcgcgtgcagggccagactggaggtggcaacgccaatcagcaacgactgtttgcccgccagttgttgtgccacgcggttgggaatgtaattcagctccgccatcgccgcttccactttttcccgcgttttcgcagaaacgtggctggcctggttcaccacgcgggaaacggtctgataagagacaccggcatactctgcgacatcgtataacgttactggtttcacattcaccaccctgaattgactctcttccgggcgctatcatgccataccgcgaaaggttttgcgccattcgatggtgtccgggatctcgacgctctcccttatgcgactcctgcattaggaagcagcccagtagtaggttgaggccgttgagcaccgccgccgcaaggaatggtgcatgcaaggagatggcgcccaacagtcccccggccacggggcctgccaccatacccacgccgaaacaagcgctcatgagcccgaagtggcgagcccgatcttccccatcggtgatgtcggcgatataggcgccagcaaccgcacctgtggcgccggtgatgccggccacgatgcgtccggcgtagaggatcgagatctcgatcccgcgaaattaatacgactcactataggggaattgtgagcggataacaattcccctctagaaataattttgtttaactttaagaaggagatatacatatgcctatgccgaaaccggcggtggagagcgagttcagcaaggttctgaagaaacacttcccgggcgagcgttttcgtagcagctacatgaaacgtggtggcaagatcctggcggcgcaaggcgaggaagcggtggttgcgtatctgcagggcaaaagcgaggaagagccgccgaacttccaaccgccggcgaaatgccacgtggttaccaagagccgtgactttgcggagtggccgattatgaaggcgagcgaagcgatccagcgttacatttatgcgctgagcaccaccgagcgtgcggcgtgcaaaccgggcaagagcagcgaaagccatgcggcgtggtttgcggcgaccggcgtgagcaaccacggctacagccacgttcaaggcctgaacctgatctttgaccacaccctgggtcgttatgatggcgtgctgaagaaagttcagctgcgtaacgagaaagcgcgtgcgcgtctggaaagcatcaacgcgagccgtgcggatgagggtctgccggaaattaaggcggaagaggaagaggtggcgaccaacgaaaccggccacctgctgcagccgccgggtatcaacccgagcttttacgtttatcaaaccattagcccgcaggcgtaccgtccgcgtgacgagattgtgctgccgccggaatacgcgggttatgttcgtgatccgaacgcgccgattccgctgggcgtggttcgtaaccgttgcgacatccaaaaaggttgcccgggctacattccggagtggcagcgtgaagcgggtaccgcgatcagcccgaaaaccggcaaggcggtgaccgttccgggtctgagcccgaagaaaaacaagcgtatgcgtcgttattggcgtagcgagaaagaaaaggcgcaagatgcgctgctggtgaccgttcgtatcggtaccgactgggtggttattgatgttcgtggcctgctgcgtaacgcgcgttggcgtaccatcgcgccgaaagacattagcctgaacgcgctgctggacctgttcaccggcgacccggtgatcgatgttcgtcgtaacattgttacctttacctacaccctggacgcgtgcggtacctatgcgcgtaagtggaccctgaaaggcaagcagaccaaagcgaccctggacaagctgaccgcgacccaaaccgtggcgctggttgcgatcgatctgggtcagaccaacccgatcagcgcgggcattagccgtgtgacccaagagaacggtgcgctgcagtgcgaaccgctggaccgtttcaccctgccggacgatctgctgaaagacatcagcgcgtaccgtattgcgtgggatcgtaacgaagaggaactgcgtgcgcgtagcgttgaggcgctgccggaagcgcagcaagcggaagtgcgtgcgctggatggtgttagcaaggaaaccgcgcgtacccaactgtgcgcggacttcggtctggacccgaaacgtctgccgtgggacaagatgagcagcaacaccacctttatcagcgaggcgctgctgagcaacagcgtgagccgtgatcaggttttctttaccccggcgccgaagaaaggtgcgaagaaaaaggcgccggtggaagttatgcgtaaagaccgtacctgggcgcgtgcgtataagccgcgtctgagcgtggaggcgcagaaactgaagaacgaagcgctgtgggcgctgaaacgtaccagcccggagtacctgaaactgagccgtcgtaaagaggagctgtgccgtcgtagcatcaactatgtgattgagaagacccgtcgtcgtacccagtgccaaatcgtgattccggttattgaagacctgaacgttcgtttctttcacggtagcggcaaacgtctgccgggttgggataacttctttaccgcgaaaaaggaaaaccgttggttcatccaaggcctgcacaaggcgtttagcgacctgcgtacccaccgtagcttctacgtgtttgaggttcgtccggaacgtaccagcattacctgcccgaaatgcggtcactgcgaggttggtaaccgtgatggcgaagcgttccagtgcctgagctgcggcaagacctgcaacgcggacctggatgtggcgacccacaacctgacccaagttgcgctgaccggcaaaaccatgccgaagcgtgaggaaccgcgtgacgcgcagggtaccgcgccggcgcgtaaaaccaaaaaggcgagcaaaagcaaggctccgccggcggagcgtgaagatcaaaccccggcgcaagagccgagccagaccagctaaggtacccttgaggtgctgtttcagggaccaggaggtagtggatctgcttggagccatccacagttcgaaaaaggtggaggttctggcggtggatcaggtggaagtgcatggtctcaccctcagtttgagaaataaggatccggctgctaacaaagcccgaaaggaagctgagttggctgctgccaccgctgagcaataactagcataaccccttggggcctctaaacgggtcttgaggggttttttgctgaaaggaggaactatatccggatatcccgcaagaggcccggcagtaccggcataaccaagcctatgcctacagcatccagggtgacggtgccgaggatgacgatgagcgcattgttagatttcatacacggtgcctgactgcgttagcaatttaactgtgataaactaccgcattaaagcttatcgatgataagctgtcaaacatgagaattcttgaagacgaaagggcctcgtgatacgcctatttttataggttaatgtcatgataataatggtttcttagacgtcaggtggcacttttcggggaaatgtgcgcggaacccctatttgtttatttttctaaatacattcaaatatgtatccgctcatgagacaataaccctgataaatgcttcaataatattgaaaaaggaagagtatgagtattcaacatttccgtgtcgcccttattcccttttttgcggcattttgccttcctgtttttgctcacccagaaacgctggtgaaagtaaaagatgctgaagatcagttgggtgcacgagtgggttacatcgaactggatctcaacagcggtaagatccttgagagttttcgccccgaagaacgttttccaatgatgagcacttttaaagttctgctatgtggcgcggtattatcccgtgttgacgccgggcaagagcaactcggtcgccgcatacactattctcagaatgacttggttgagtactcaccagtcacagaaaagcatcttacggatggcatgacagtaagagaattatgcagtgctgccataaccatgagtgataacactgcggccaacttacttctgacaacgatcggaggaccgaaggagctaaccgcttttttgcacaacatgggggatcatgtaactcgccttgatcgttgggaaccggagctgaatgaagccataccaaacgacgagcgtgacaccacgatgcctgcagcaatggcaacaacgttgcgcaaactattaactggcgaactacttactctagcttcccggcaacaattaatagactggatggaggcggataaagttgcaggaccacttctgcgctcggcccttccggctggctggtttattgctgataaatctggagccggtgagcgtgggtctcgcggtatcattgcagcactggggccagatggtaagccctcccgtatcgtagttatctacacgacggggagtcaggcaactatggatgaacgaaatagacagatcgctgagataggtgcctcactgattaagcattggtaactgtcagaccaagtttactcatatatactttagattgatttaaaacttcatttttaatttaaaaggatctaggtgaagatcctttttgataatctcatgaccaaaatcccttaacgtgagttttcgttccactgagcgtcagaccccgtagaaaagatcaaaggatcttcttgagatcctttttttctgcgcgtaatctgctgcttgcaaacaaaaaaaccaccgctaccagcggtggtttgtttgccggatcaagagctaccaactctttttccgaaggtaactggcttcagcagagcgcagataccaaatactgtccttctagtgtagccgtagttaggccaccacttcaagaactctgtagcaccgcctacatacctcgctctgctaatcctgttaccagtggctgctgccagtggcgataagtcgtgtcttaccgggttggactcaagacgatagttaccggataaggcgcagcggtcgggctgaacggggggttcgtgcacacagcccagcttggagcgaacgacctacaccgaactgagatacctacagcgtgagctatgagaaagcgccacgcttcccgaagggagaaaggcggacaggtatccggtaagcggcagggtcggaacaggagagcgcacgagggagcttccagggggaaacgcctggtatctttatagtcctgtcgggtttcgccacctctgacttgagcgtcgatttttgtgatgctcgtcaggggggcggagcctatggaaaaacgccagcaacgcggcctttttacggttcctggccttttgctggccttttgctcacatgttctttcctgcgttatcccctgattctgtggataaccgtattaccgcctttgagtgagctgataccgctcgccgcagccgaacgaccgagcgcagcgagtcagtgagcgaggaagcggaagagcgcctgatgcggtattttctccttacgcatctgtgcggtatttcacaccgcatatatggtgcactctcagtacaatctgctctgatgccgcatagttaagccagtatacactccgctatcgctacgtgactgggtcatggctgcgccccgacacccgccaacacccgctgacgcgccctgacgggcttgtctgctcccggcatccgcttacagacaagctgtgaccgtctccgggagctgcatgtgtcagaggttttcaccgtcatcaccgaaacgcgcgaggcagctgcggtaaagctcatcagcgtggtcgtgaagcgattcacagatgtctgcctgttcatccgcgtccagctcgttgagtttctccagaagcgttaatgtctggcttctgataaagcgggccatgttaagggcggttttttcctgtttggtcactgatgcctccgtgtaagggggatttctgttcatgggggtaatgataccgatgaaacgagagaggatgctcacgatacgggttactgatgatgaacatgcccggttactggaacgttgtgagggtaaacaactggcggtatggatgcggcgggaccagagaaaaatcactcagggtcaatgccagcgcttcgttaatacagatgtaggtgttccacagggtagccagcagcatcctgcgatgcagatccggaacataatggtgcagggcgctgacttccgcgtttccagactttacgaaacacggaaaccgaagaccattcatgttgttgctcaggtcgcagacgttttgcagcagcagtcgcttcacgttcgctcgcgtatcggtgattcattctgctaaccagtaaggcaaccccgccagcctagccgggtcctcaacgacaggagcacgatcatgcgcacccgtggccaggacccaacgctgcccgagatgcgccgcgtgcggctgctggagatggcggacgcgatggatatgttctgccaagggttggtttgcgcattcacagttctccgcaagaattgattggctccaattcttggagtggtgaatccgttagcgaggtgccgccggcttccattcaggtcgaggtggcccggctccatgcaccgcgacgcaacgcggggaggcagacaaggtatagggcggcgcctacaatccatgccaacccgttccatgtgctcgccgaggcggcataaatcgccgtgacgatcagcggtccagtgatcgaagttaggctggtaagagccgcgagcgatccttgaagctgtccctgatggtcgtcatctacctgcctggacagcatggcctgcaacgcgggcatcccgatgccgccggaagcgagaagaatcataatggggaaggccatccagcctcgcgtcgcgaacgccagcaagacgtagcccagcgcgtcggccgccatgccggcgataatggcctgcttctcgccgaaacgtttggtggcgggaccagtgacgaaggcttgagcgagggcgtgcaagattccgaataccgcaagcgacaggccgatcatcgtcgcgctccagcgaaagcggtcctcgccgaaaatgacccagagcgctgccggcacctgtcctacgagttgcatgataaagaagacagtcataagtgcggcgacgatagtcatgccccgcgcccaccggaaggagctgactgggttgaaggctctcaagggcatcggtcgagatcccggtgcctaatgagtgagctaacttacattaattgcgttgcgctcactgcccgctttccagtcgggaaacctgtcgtgccagctgcattaatgaatcggccaacgcgcggggagaggcggtttgcgtattgggcgccagggtggtttttcttttcaccagtgagacgggcaacagctgattgcccttcaccgcctggccctgagagagttgcagcaagcggtccacgctggtttgccccagcaggcgaaaatcctgtttgatggtggttaacggcgggatataacatgagctgtcttcggtatcgtcgtatcccactaccgagatatccgcaccaacgcgcagcccggactcggtaatggcgcgcattgcgcccagcgccatctgatcgttggcaaccagcatcgcagtgggaacgatgccctcattcagcatttgcatggtttgttgaaaaccggacatggcactccagtcgccttcccgttccgctatcggctgaatttgattgcgagtgagatatttatgccagccagccagacgcagacgcgccgagacagaacttaatgggcccgctaacagcgcgatttgctggtgacccaatgcgaccagatgctccacgcccagtcgcgtaccgtcttcatgggagaaaataatactgttgatgggtgtc

SEQ ID NO: 113 - protein, 757 aa, Serratia entomophila; identical to SEQ ID NO: 99

SEQ ID NO: 114 - DNA, 12322 bp, Serratia entomophila
  source 1..12322: mol_type = other DNA
  CDS 933..7478: note = Afp18 C terminal truncation at L2181
tggtcagagacatcaagaaataacgccggaacattagtgcaggcagcttccacagcaatggcatcctggtcatccagcggatagttaatgatcagcccactgacgcgttgcgcgagaagattgtgcaccgccgctttacaggcttcgacgccgcttcgttctaccatcgacaccaccacgctggcacccagttgatcggcgcgagatttaatcgccgcgacaatttgcgacggcgcgtgcagggccagactggaggtggcaacgccaatcagcaacgactgtttgcccgccagttgttgtgccacgcggttgggaatgtaattcagctccgccatcgccgcttccactttttcccgcgttttcgcagaaacgtggctggcctggttcaccacgcgggaaacggtctgataagagacaccggcatactctgcgacatcgtataacgttactggtttcacattcaccaccctgaattgactctcttccgggcgctatcatgccataccgcgaaaggttttgcgccattcgatggtgtccgggatctcgacgctctcccttatgcgactcctgcattaggaagcagcccagtagtaggttgaggccgttgagcaccgccgccgcaaggaatggtgcatgcaaggagatggcgcccaacagtcccccggccacggggcctgccaccatacccacgccgaaacaagcgctcatgagcccgaagtggcgagcccgatcttccccatcggtgatgtcggcgatataggcgccagcaaccgcacctgtggcgccggtgatgccggccacgatgcgtccggcgtagaggatcgagatctcgatcccgcgaaattaatacgactcactataggggaattgtgagcggataacaattcccctctagaaataattttgtttaactttaagaaggagatatacatatgccttactccagtgagtcgaaggaaaaagaaacacactcaaaagaaaccgaaagagataatgctgacccagtatttcaacgggtcagccagggcggcgtgggtgtttcaccgcctgatgaggggggagacttgtcggccggaagtaacaatgaccatttattcgcttttattcgtgaaacacacttggaagaagcccaggaattcaggctaaaagggtataacagccaggtgcccgaggttgacgagggattactgacgcagctgcgtgacgacctggcggcggccaaatcccgccagtacgttcaggcaagcgttggggggccgctgggttctcggtggctgctggaacagataggcaaaatagagcggctgacggacaagttttctgacgaagtaataaaacgctgggttaagcatgagctgccacgaaaaaacgtaggggaagccgcggggaccgagttggggagccggcgtagggctcagtcgctggccagacggttggagtcaaccatgcagacactgatccgcgttgtccataccctgcatgctatggatgactacagtaccccggaaaaacggcacgacatgctggtcgctgagcttaccggcgcgttctcctccagtgataaaaatacggtgatacaggcgctggggagaatgacggcagagacgtcaggtcatgccgcctgggcttcccttatgcaggcccggacagcggcgtgggaggccggtaagtcagccaccgtcgatgcgatgattgcgacttcacagcacgaagcagaaaaagccaataaaaaagcccgtgagcttcagggcgattcacaggctttctttagtcatgtcgccgcctatcttcagagcctctccagcgatttggcaaaagtgtcgattaacatggggcagagcacctcttcctcgactatacggaacgaagcagaaaaagccagtgagcttcagggcgattcacagactttcgttagtcatgtcgccgcctatcttcagagcctccctagcgatttggcaaaagtgccgattaacatgtggcagaatatggattttgttaagacaaaattacaagcgcaaactgcagttgcgggaatgaaagtgcatgcgcaccggcttgtccggatcgcacagcatggtcactccaccaaaacccctgcgaaggatcccgaacaggtcgttaccgattccatcatcagaagcattttatggctgtggcagcagccggccatcaaaatccagtgcgccagcactgcgttgttgtcaaaagtgggtgagctgaaaaaaattgaggggatactggcttcttacgccgtgacggatgagctgggaaacgaacaagaacgccgcaaccctccgggtgaggaggacctggatgcacagctcagggaatgggtgagcgccagccttaagcaggaaaaccccgaaaaccagcgggcggtaaaagtggtgacgctggagcggctgctgggcggtgatatcgccagtgcccgcaacctggtggaacgtctgggaaaagcggaagagggtattcagaatctgctcaggcggcagcaggttgctgtcctgaaaatgtcagttgagcgcttgcctgccgctgtttcctctctgaaggccgtggataaattactgccggatttggcaggtgacctcacggcgagtatcgccgccctgagcaacgcccttcaggcagccgaataccccgcccgcgactttagcgaagcaaaaatacaggccggctatgcacaattgtgggcgacaaaggtgaaggaaagtctgtcggcagcgtctgcacggctgaccgaaagaccgctggatgaacattcacggggcgcacgccttgccaaacattgggcaaacctcgccaaagaacggagcgtgggtaattatccgccgccggatgcacagcaggtacttgcctccctgaaggaacaggggctattagcggggaccctttcaaccggagatccggccgggtatcttttcgccacccggcttgccggtgagcttgaaaatgccggtaatggtgaattgcgattaccgatgagtccggagcaatatgttgctttagagaagggacttgttgagtatattgtaaaatggggacaacggcggatctcacaaggagtcacccgcattgttattgagttgtcctttgagcaggctctggatacggtatcgttcaacgtgtccaagctcttccggttaccttataaggtgctgaaggcctcgataaaaataccgtacaatgtcaataaggttaataattataccatgccgggccatgataagccctataaggcaatttatggcttgctgggaaaaaagcttaagcaacttggctttaatttactgacggcacccgtgcctggcgtgatgaaacttgtggctggcaccgggataaccgcaggtgcaggcgtgcataatttacgtgtcgaaaatagagagaaaacattcagcgcggtttatcaacacgtggtggaaggaaagcaaagtgaaaaaataaaaatggactccgtgaagtcgatgatttttgattcagtgctcgataccgccactacggccgcttttaaagggggacgaagagcctggcaatcaggaagaaataaaaacgacattgaaatcaatgaggtaacactttctcaagcacagcagcgccaagtggcagccaacaatgttgacactgcatgggggaatgctgctgcgaatgagaggaaggttgagccagtgagtcattcatcaccattacagcaacaaaccgatgttaggccgttctctgataagagtgaccaggatgctgctcaacctcgagtacgtaaacgggcagtggcggatatggctccccctccccctcatcaatggcataataacattcctgccaacacgacgctacagtcagaacattttgattttgatcgtgacatacgttatcagggcttctccgatgagaagaaaaaacaaacctatttacatggtattcaacttgtattgcttcagatacaaaatgatggacgctttgcacagaagatcaggaataatgcctaccttgccagtataggcgtttcgaacttagtacctgtcgatatagaaggatataaacttaaaaatacatttcttcttcctgatagcccaagtgctaaatctggagttattgttcgcttagattctgaaaatccttattactatgttggcaaagggagtgatcttttagaagacatcaaatgggccatgcctcatgatgctaatgaacagaagtatgaatatatgcctgattctgatgggaacgctcacttttaccgtctgcgcaacggttttgatatctttaatgatattaggatggggaattcaagtttcgaatatttctttaattataataatccggagccgataagcatcacgagactttcttcatatcttgcaaatactattgagggtgactataaaaacggatcgtcgcccccaaaaaacaaactattaatttccagagcgattactggtgctcatattcctgacccaggggtcactgcaaccgccgctggatatcatatcgaattcacctgggataatttgacttcagcagagtatctgaggtcattttcaaggcccttctctaccctcagtggagaaatgcagttagtgtctagctccattaatggagaaacgatacaggaaacagagctgcatgttcatcaggctgaatatataggaagctgggttgatgctactgtcggggccatcacatctttcacgccggagggatgggttctcaataccacactatcggcagcggacattgctgctgatttgacagaagataaggatcctgacccaatggcggttgctggcctggttgtaggatgcattcctggtggtcggattgcagctaaagtcggaaagttcacccgtattggcggtaaggttgttaaatacgggcttatgcttggcaataaagcggtcgacctggccatcgtagggaagagcgttaagatagctgtagacacgggtgatccactcgcaatttataaggcgcttctgatcagtggcataggtactacgaattcttacgatatggcaaagaatatgtcatcaaagctaaaaatcagcaagaaactggaagacagtgttcaattagataaaccactacaaaatctaaggggaggaagcaagcgtcctgaagagggtgaatcaacctcgcagaagcgttcacagccagatgagagtccagaaaatagtcaggaggctgtatattcaggcccctccggcagagctcgggtgacttttgaccagacgaccgaacatcatataatgcttaatagattttccagacttgtgttagctagaagttttgcagagaaaagaatacagtcttttgaacacagttcttcgaaatttaaaagcagtgacgagtttaaggtagataaaagcatacctttagatgcacaaaatgcttcacttaacgacatggcgagtaagacagataacttaattaatcagctagaacaatttacaggagataagaaagaatccatttccgccaatctgaaaaacatccagttaatgattggtgatataatggaaaatagaaacaataggaatgataatttaaatttccatacttatgtcttggttgggaaaaatacaacatatgacgaaataagtaactattatggttttgctgagtttaaattttcaataaataatggcaatcttactcttaacaaccttataggccacccttatgtcgtcattaataaataccctgaatttagagattatttgataagaaatggagtcatcacccaacccgagcttgaaccatataacataaagaatgtggctcggtatcttggctctaaagcggtgagcagtgagattggttattatgaatccattccagctactaaagtgaagattctctcgtttactggagccaatccgattacgcaaaaattaggtaatacacttcagagtatctctgatcttttttcaaaaaaacgattttcggacgaaccgaatgacgccatcactcaggatgaactatttacccgtcagactgatttatatacttatgatgagatgataaatcatctaaaaactatagtaagaacgacattcacacctgttaaaccgatagaagaaatatccagtgaaaaaactgatgcggccattaaaggaataatgaccaatggggatgcggaaataatttccgaaaacattatcgagagcaaaaatagtttagaccatgatacaagttatttttctcatgaagttatttcagctgttgatcgtgcatatgaaaaagtaaactccgtgaaatctctttttgaacgtgcagaatctcagcctgagattaaatctcaattaaaatcattaattaatgaagccactggattgaatgatgaggttatcattgatattgataaagtagatgtttctagcatatcagacatggcctataacaggtttaaagataatatcaatactctacatgactatctctctaagcaaaaatcagggggttatacatcctttgttttatttaaatatcgccagtttaatccatccaagcctgatgcctttgccatgccctatgacagtaagaaaagaatttttctggctatgttgccagaaaatcagcgccatggtggattagttgatacggtgacccatgaagcttcacataattcttcttacacattagatcatacttatatagggaacgcgcggagtaacaccggttcatttccttcctcatttgaacctccaactcgagattcgaggtatttttatgaaaatgaacgggtaggtaaactgagtgcaaagtatgctttagacttacccgaaaatgctaatatcacccaaaatcaactagcgcaggcagatattctgttaagaaacagcaggttgactaaagcagatacgcttctgaatgctgcagaatataatgcttatatgattgacgttctaagccgggtaaaaataaacggctcacatattgagtttgaagaaaactcatccagaagcaaacgctctgtttccggaggaaatcataaacttgatgatataattatactggcttcgatgaacgctacgcttcctaggagggaggggggggaatttgagtcatctaccttcaagaaaacattaacggaatttataaacaagggtacgaccagcagtcaggttgatcctgtttatgcatcctatctaccagcgtttaataccattgtagatagcgagggtattacattgcaacaggtgaaagacttaaaatcagctctgcccgcaaccggcaacgatctgagggctcaagccagatataactatgcggtgctacaatatttatctgggtcggcaggaattaagctaccaattgatactgatgtaatacgaaatagcattaatgatgatctgaatattgcaagttgcgtagataactgtaaaaaggcagcctcacaaaggcttgagttgttgaaggcggtgccagaatatttatctgggccggaagcaattcacgcacagattgatactaatttataaggtacccttgaggtgctgtttcagggaccaggaggtagtggatctgcttggagccatccacagttcgaaaaaggtggaggttctggcggtggatcaggtggaagtgcatggtctcaccctcagtttgagaaataaggatccggctgctaacaaagcccgaaaggaagctgagttggctgctgccaccgctgagcaataactagcataaccccttggggcctctaaacgggtcttgaggggttttttgctgaaaggaggaactatatccggatatcccgcaagaggcccggcagtaccggcataaccaagcctatgcctacagcatccagggtgacggtgccgaggatgacgatgagcgcattgttagatttcatacacggtgcctgactgcgttagcaatttaactgtgataaactaccgcattaaagcttatcgatgataagctgtcaaacatgagaattcttgaagacgaaagggcctcgtgatacgcctatttttataggttaatgtcatgataataatggtttcttagacgtcaggtggcacttttcggggaaatgtgcgcggaacccctatttgtttatttttctaaatacattcaaatatgtatccgctcatgagacaataaccctgataaatgcttcaataatattgaaaaaggaagagtatgagtattcaacatttccgtgtcgcccttattcccttttttgcggcattttgccttcctgtttttgctcacccagaaacgctggtgaaagtaaaagatgctgaagatcagttgggtgcacgagtgggttacatcgaactggatctcaacagcggtaagatccttgagagttttcgccccgaagaacgttttccaatgatgagcacttttaaagttctgctatgtggcgcggtattatcccgtgttgacgccgggcaagagcaactcggtcgccgcatacactattctcagaatgacttggttgagtactcaccagtcacagaaaagcatcttacggatggcatgacagtaagagaattatgcagtgctgccataaccatgagtgataacactgcggccaacttacttctgacaacgatcggaggaccgaaggagctaaccgcttttttgcacaacatgggggatcatgtaactcgccttgatcgttgggaaccggagctgaatgaagccataccaaacgacgagcgtgacaccacgatgcctgcagcaatggcaacaacgttgcgcaaactattaactggcgaactacttactctagcttcccggcaacaattaatagactggatggaggcggataaagttgcaggaccacttctgcgctcggcccttccggctggctggtttattgctgataaatctggagccggtgagcgtgggtctcgcggtatcattgcagcactggggccagatggtaagccctcccgtatcgtagttatctacacgacggggagtcaggcaactatggatgaacgaaatagacagatcgctgagataggtgcctcactgattaagcattggtaactgtcagaccaagtttactcatatatactttagattgatttaaaacttcatttttaatttaaaaggatctaggtgaagatcctttttgataatctcatgaccaaaatcccttaacgtgagttttcgttccactgagcgtcagaccccgtagaaaagatcaaaggatcttcttgagatcctttttttctgcgcgtaatctgctgcttgcaaacaaaaaaaccaccgctaccagcggtggtttgtttgccggatcaagagctaccaactctttttccgaaggtaactggcttcagcagagcgcagataccaaatactgtccttctagtgtagccgtagttaggccaccacttcaagaactctgtagcaccgcctacatacctcgctctgctaatcctgttaccagtggctgctgccagtggcgataagtcgtgtcttaccgggttggactcaagacgatagttaccggataaggcgcagcggtcgggctgaacggggggttcgtgcacacagcccagcttggagcgaacgacctacaccgaactgagatacctacagcgtgagctatgagaaagcgccacgcttcccgaagggagaaaggcggacaggtatccggtaagcggcagggtcggaacaggagagcgcacgagggagcttccagggggaaacgcctggtatctttatagtcctgtcgggtttcgccacctctgacttgagcgtcgatttttgtgatgctcgtcaggggggcggagcctatggaaaaacgccagcaacgcggcctttttacggttcctggccttttgctggccttttgctcacatgttctttcctgcgttatcccctgattctgtggataaccgtattaccgcctttgagtgagctgataccgctcgccgcagccgaacgaccgagcgcagcgagtcagtgagcgaggaagcggaagagcgcctgatgcggtattttctccttacgcatctgtgcggtatttcacaccgcatatatggtgcactctcagtacaatctgctctgatgccgcatagttaagccagtatacactccgctatcgctacgtgactgggtcatggctgcgccccgacacccgccaacacccgctgacgcgccctgacgggcttgtctgctcccggcatccgcttacagacaagctgtgaccgtctccgggagctgcatgtgtcagaggttttcaccgtcatcaccgaaacgcgcgaggcagctgcggtaaagctcatcagcgtggtcgtgaagcgattcacagatgtctgcctgttcatccgcgtccagctcgttgagtttctccagaagcgttaatgtctggcttctgataaagcgggccatgttaagggcggttttttcctgtttggtcactgatgcctccgtgtaagggggatttctgttcatgggggtaatgataccgatgaaacgagagaggatgctcacgatacgggttactgatgatgaacatgcccggttactggaacgttgtgagggtaaacaactggcggtatggatgcggcgggaccagagaaaaatcactcagggtcaatgccagcgcttcgttaatacagatgtaggtgttccacagggtagccagcagcatcctgcgatgcagatccggaacataatggtgcagggcgctgacttccgcgtttccagactttacgaaacacggaaaccgaagaccattcatgttgttgctcaggtcgcagacgttttgcagcagcagtcgcttcacgttcgctcgcgtatcggtgattcattctgctaaccagtaaggcaaccccgccagcctagccgggtcctcaacgacaggagcacgatcatgcgcacccgtggccaggacccaacgctgcccgagatgcgccgcgtgcggctgctggagatggcggacgcgatggatatgttctgccaagggttggtttgcgcattcacagttctccgcaagaattgattggctccaattcttggagtggtgaatccgttagcgaggtgccgccggcttccattcaggtcgaggtggcccggctccatgcaccgcgacgcaacgcggggaggcagacaaggtatagggcggcgcctacaatccatgccaacccgttccatgtgctcgccgaggcggcataaatcgccgtgacgatcagcggtccagtgatcgaagttaggctggtaagagccgcgagcgatccttgaagctgtccctgatggtcgtcatctacctgcctggacagcatggcctgcaacgcgggcatcccgatgccgccggaagcgagaagaatcataatggggaaggccatccagcctcgcgtcgcgaacgccagcaagacgtagcccagcgcgtcggccgccatgccggcgataatggcctgcttctcgccgaaacgtttggtggcgggaccagtgacgaaggcttgagcgagggcgtgcaagattccgaataccgcaagcgacaggccgatcatcgtcgcgctccagcgaaagcggtcctcgccgaaaatgacccagagcgctgccggcacctgtcctacgagttgcatgataaagaagacagtcataagtgcggcgacgatagtcatgccccgcgcccaccggaaggagctgactgggttgaaggctctcaagggcatcggtcgagatcccggtgcctaatgagtgagctaacttacattaattgcgttgcgctcactgcccgctttccagtcgggaaacctgtcgtgccagctgcattaatgaatcggccaacgcgcggggagaggcggtttgcgtattgggcgccagggtggtttttcttttcaccagtgagacgggcaacagctgattgcccttcaccgcctggccctgagagagttgcagcaagcggtccacgctggtttgccccagcaggcgaaaatcctgtttgatggtggttaacggcgggatataacatgagctgtcttcggtatcgtcgtatcccactaccgagatatccgcaccaacgcgcagcccggactcggtaatggcgcgcattgcgcccagcgccatctgatcgttggcaaccagcatcgcagtgggaacgatgccctcattcagcatttgcatggtttgttgaaaaccggacatggcactccagtcgccttcccgttccgctatcggctgaatttgattgcgagtgagatatttatgccagccagccagacgcagacgcgccgagacagaacttaatgggcccgctaacagcgcgatttgctggtgacccaatgcgaccagatgctccacgcccagtcgcgtaccgtcttcatgggagaaaataatactgttgatgggtgtc

SEQ ID NO: 115 - protein, 2181 aa, Serratia entomophila
MPYSSESKEKETHSKETERDNADPVFQRVSQGGVGVSPPDEGGDLSAGSNNDHLFAFIRETHLEEAQEFRLKGYNSQVPEVDEGLLTQLRDDLAAAKSRQYVQASVGGPLGSRWLLEQIGKIERLTDKFSDEVIKRWVKHELPRKNVGEAAGTELGSRRRAQSLARRLESTMQTLIRVVHTLHAMDDYSTPEKRHDMLVAELTGAFSSSDKNTVIQALGRMTAETSGHAAWASLMQARTAAWEAGKSATVDAMIATSQHEAEKANKKARELQGDSQAFFSHVAAYLQSLSSDLAKVSINMGQSTSSSTIRNEAEKASELQGDSQTFVSHVAAYLQSLPSDLAKVPINMWQNMDFVKTKLQAQTAVAGMKVHAHRLVRIAQHGHSTKTPAKDPEQVVTDSIIRSILWLWQQPAIKIQCASTALLSKVGELKKIEGILASYAVTDELGNEQERRNPPGEEDLDAQLREWVSASLKQENPENQRAVKVVTLERLLGGDIASARNLVERLGKAEEGIQNLLRRQQVAVLKMSVERLPAAVSSLKAVDKLLPDLAGDLTASIAALSNALQAAEYPARDFSEAKIQAGYAQLWATKVKESLSAASARLTERPLDEHSRGARLAKHWANLAKERSVGNYPPPDAQQVLASLKEQGLLAGTLSTGDPAGYLFATRLAGELENAGNGELRLPMSPEQYVALEKGLVEYIVKWGQRRISQGVTRIVIELSFEQALDTVSFNVSKLFRLPYKVLKASIKIPYNVNKVNNYTMPGHDKPYKAIYGLLGKKLKQLGFNLLTAPVPGVMKLVAGTGITAGAGVHNLRVENREKTFSAVYQHVVEGKQSEKIKMDSVKSMIFDSVLDTATTAAFKGGRRAWQSGRNKNDIEINEVTLSQAQQRQVAANNVDTAWGNAAANERKVEPVSHSSPLQQQTDVRPFSDKSDQDAAQPRVRKRAVADMAPPPPHQWHNNIPANTTLQSEHFDFDRDIRYQGFSDEKKKQTYLHGIQLVLLQIQNDGRFAQKIRNNAYLASIGVSNLVPVDIEGYKLKNTFLLPDSPSAKSGVIVRLDSENPYYYVGKGSDLLEDIKWAMPHDANEQKYEYMPDSDGNAHFYRLRNGFDIFNDIRMGNSSFEYFFNYNNPEPISITRLSSYLANTIEGDYKNGSSPPKNKLLISRAITGAHIPDPGVTATAAGYHIEFTWDNLTSAEYLRSFSRPFSTLSGEMQLVSSSINGETIQETELHVHQAEYIGSWVDATVGAITSFTPEGWVLNTTLSAADIAADLTEDKDPDPMAVAGLVVGCIPGGRIAAKVGKFTRIGGKVVKYGLMLGNKAVDLAIVGKSVKIAVDTGDPLAIYKALLISGIGTTNSYDMAKNMSSKLKISKKLEDSVQLDKPLQNLRGGSKRPEEGESTSQKRSQPDESPENSQEAVYSGPSGRARVTFDQTTEHHIMLNRFSRLVLARSFAEKRIQSFEHSSSKFKSSDEFKVDKSIPLDAQNASLNDMASKTDNLINQLEQFTGDKKESISANLKNIQLMIGDIMENRNNRNDNLNFHTYVLVGKNTTYDEISNYYGFAEFKFSINNGNLTLNNLIGHPYVVINKYPEFRDYLIRNGVITQPELEPYNIKNVARYLGSKAVSSEIGYYESIPATKVKILSFTGANPITQKLGNTLQSISDLFSKKRFSDEPNDAITQDELFTRQTDLYTYDEMINHLKTIVRTTFTPVKPIEEISSEKTDAAIKGIMTNGDAEIISENIIESKNSLDHDTSYFSHEVISAVDRAYEKVNSVKSLFERAESQPEIKSQLKSLINEATGLNDEVIIDIDKVDVSSISDMAYNRFKDNINTLHDYLSKQKSGGYTSFVLFKYRQFNPSKPDAFAMPYDSKKRIFLAMLPENQRHGGLVDTVTHEASHNSSYTLDHTYIGNARSNTGSFPSSFEPPTRDSRYFYENERVGKLSAKYALDLPENANITQNQLAQADILLRNSRLTKADTLLNAAEYNAYMIDVLSRVKINGSHIEFEENSSRSKRSVSGGNHKLDDIIILASMNATLPRREGGEFESSTFKKTLTEFINKGTTSSQVDPVYASYLPAFNTIVDSEGITLQQVKDLKSALPATGNDLRAQARYNYAVLQYLSGSAGIKLPIDTDVIRNSINDDLNIASCVDNCKKAASQRLELLKAVPEYLSGPEAIHAQIDTNL

SEQ ID NO: 116 - DNA, 11368 bp, Serratia entomophila
  source 1..11368: mol_type = other DNA
  CDS 933..6524: note = Afp18 C-terminal truncation at A1863
tggtcagagacatcaagaaataacgccggaacattagtgcaggcagcttccacagcaatggcatcctggtcatccagcggatagttaatgatcagcccactgacgcgttgcgcgagaagattgtgcaccgccgctttacaggcttcgacgccgcttcgttctaccatcgacaccaccacgctggcacccagttgatcggcgcgagatttaatcgccgcgacaatttgcgacggcgcgtgcagggccagactggaggtggcaacgccaatcagcaacgactgtttgcccgccagttgttgtgccacgcggttgggaatgtaattcagctccgccatcgccgcttccactttttcccgcgttttcgcagaaacgtggctggcctggttcaccacgcgggaaacggtctgataagagacaccggcatactctgcgacatcgtataacgttactggtttcacattcaccaccctgaattgactctcttccgggcgctatcatgccataccgcgaaaggttttgcgccattcgatggtgtccgggatctcgacgctctcccttatgcgactcctgcattaggaagcagcccagtagtaggttgaggccgttgagcaccgccgccgcaaggaatggtgcatgcaaggagatggcgcccaacagtcccccggccacggggcctgccaccatacccacgccgaaacaagcgctcatgagcccgaagtggcgagcccgatcttccccatcggtgatgtcggcgatataggcgccagcaaccgcacctgtggcgccggtgatgccggccacgatgcgtccggcgtagaggatcgagatctcgatcccgcgaaattaatacgactcactataggggaattgtgagcggataacaattcccctctagaaataattttgtttaactttaagaaggagatatacatatgccttactccagtgagtcgaaggaaaaagaaacacactcaaaagaaaccgaaagagataatgctgacccagtatttcaacgggtcagccagggcggcgtgggtgtttcaccgcctgatgaggggggagacttgtcggccggaagtaacaatgaccatttattcgcttttattcgtgaaacacacttggaagaagcccaggaattcaggctaaaagggtataacagccaggtgcccgaggttgacgagggattactgacgcagctgcgtgacgacctggcggcggccaaatcccgccagtacgttcaggcaagcgttggggggccgctgggttctcggtggctgctggaacagataggcaaaatagagcggctgacggacaagttttctgacgaagtaataaaacgctgggttaagcatgagctgccacgaaaaaacgtaggggaagccgcggggaccgagttggggagccggcgtagggctcagtcgctggccagacggttggagtcaaccatgcagacactgatccgcgttgtccataccctgcatgctatggatgactacagtaccccggaaaaacggcacgacatgctggtcgctgagcttaccggcgcgttctcctccagtgataaaaatacggtgatacaggcgctggggagaatgacggcagagacgtcaggtcatgccgcctgggcttcccttatgcaggcccggacagcggcgtgggaggccggtaagtcagccaccgtcgatgcgatgattgcgacttcacagcacgaagcagaaaaagccaataaaaaagcccgtgagcttcagggcgattcacaggctttctttagtcatgtcgccgcctatcttcagagcctctccagcgatttggcaaaagtgtcgattaacatggggcagagcacctcttcctcgactatacggaacgaagcagaaaaagccagtgagcttcagggcgattcacagactttcgttagtcatgtcgccgcctatcttcagagcctccctagcgatttggcaaaagtgccgattaacatgtggcagaatatggattttgttaagacaaaattacaagcgcaaactgcagttgcgggaatgaaagtgcatgcgcaccggcttgtccggatcgcacagcatggtcactccaccaaaacccctgcgaaggatcccgaacaggtcgttaccgattccatcatcagaagcattttatggctgtggcagcagccggccatcaaaatccagtgcgccagcactgcgttgttgtcaaaagtgggtgagctgaaaaaaattgaggggatactggcttcttacgccgtgacggatgagctgggaaacgaacaagaacgccgcaaccctccgggtgaggaggacctggatgcacagctcagggaatgggtgagcgccagccttaagcaggaaaaccccgaaaaccagcgggcggtaaaagtggtgacgctggagcggctgctgggcggtgatatcgccagtgcccgcaacctggtggaacgtctgggaaaagcggaagagggtattcagaatctgctcaggcggcagcaggttgctgtcctgaaaatgtcagttgagcgcttgcctgccgctgtttcctctctgaaggccgtggataaattactgccggatttggcaggtgacctcacggcgagtatcgccgccctgagcaacgcccttcaggcagccgaataccccgcccgcgactttagcgaagcaaaaatacaggccggctatgcacaattgtgggcgacaaaggtgaaggaaagtctgtcggcagcgtctgcacggctgaccgaaagaccgctggatgaacattcacggggcgcacgccttgccaaacattgggcaaacctcgccaaagaacggagcgtgggtaattatccgccgccggatgcacagcaggtacttgcctccctgaaggaacaggggctattagcggggaccctttcaaccggagatccggccgggtatcttttcgccacccggcttgccggtgagcttgaaaatgccggtaatggtgaattgcgattaccgatgagtccggagcaatatgttgctttagagaagggacttgttgagtatattgtaaaatggggacaacggcggatctcacaaggagtcacccgcattgttattgagttgtcctttgagcaggctctggatacggtatcgttcaacgtgtccaagctcttccggttaccttataaggtgctgaaggcctcgataaaaataccgtacaatgtcaataaggttaataattataccatgccgggccatgataagccctataaggcaatttatggcttgctgggaaaaaagcttaagcaacttggctttaatttactgacggcacccgtgcctggcgtgatgaaacttgtggctggcaccgggataaccgcaggtgcaggcgtgcataatttacgtgtcgaaaatagagagaaaacattcagcgcggtttatcaacacgtggtggaaggaaagcaaagtgaaaaaataaaaatggactccgtgaagtcgatgatttttgattcagtgctcgataccgccactacggccgcttttaaagggggacgaagagcctggcaatcaggaagaaataaaaacgacattgaaatcaatgaggtaacactttctcaagcacagcagcgccaagtggcagccaacaatgttgacactgcatgggggaatgctgctgcgaatgagaggaaggttgagccagtgagtcattcatcaccattacagcaacaaaccgatgttaggccgttctctgataagagtgaccaggatgctgctcaacctcgagtacgtaaacgggcagtggcggatatggctccccctccccctcatcaatggcataataacattcctgccaacacgacgctacagtcagaacattttgattttgatcgtgacatacgttatcagggcttctccgatgagaagaaaaaacaaacctatttacatggtattcaacttgtattgcttcagatacaaaatgatggacgctttgcacagaagatcaggaataatgcctaccttgccagtataggcgtttcgaacttagtacctgtcgatatagaaggatataaacttaaaaatacatttcttcttcctgatagcccaagtgctaaatctggagttattgttcgcttagattctgaaaatccttattactatgttggcaaagggagtgatcttttagaagacatcaaatgggccatgcctcatgatgctaatgaacagaagtatgaatatatgcctgattctgatgggaacgctcacttttaccgtctgcgcaacggttttgatatctttaatgatattaggatggggaattcaagtttcgaatatttctttaattataataatccggagccgataagcatcacgagactttcttcatatcttgcaaatactattgagggtgactataaaaacggatcgtcgcccccaaaaaacaaactattaatttccagagcgattactggtgctcatattcctgacccaggggtcactgcaaccgccgctggatatcatatcgaattcacctgggataatttgacttcagcagagtatctgaggtcattttcaaggcccttctctaccctcagtggagaaatgcagttagtgtctagctccattaatggagaaacgatacaggaaacagagctgcatgttcatcaggctgaatatataggaagctgggttgatgctactgtcggggccatcacatctttcacgccggagggatgggttctcaataccacactatcggcagcggacattgctgctgatttgacagaagataaggatcctgacccaatggcggttgctggcctggttgtaggatgcattcctggtggtcggattgcagctaaagtcggaaagttcacccgtattggcggtaaggttgttaaatacgggcttatgcttggcaataaagcggtcgacctggccatcgtagggaagagcgttaagatagctgtagacacgggtgatccactcgcaatttataaggcgcttctgatcagtggcataggtactacgaattcttacgatatggcaaagaatatgtcatcaaagctaaaaatcagcaagaaactggaagacagtgttcaattagataaaccactacaaaatctaaggggaggaagcaagcgtcctgaagagggtgaatcaacctcgcagaagcgttcacagccagatgagagtccagaaaatagtcaggaggctgtatattcaggcccctccggcagagctcgggtgacttttgaccagacgaccgaacatcatataatgcttaatagattttccagacttgtgttagctagaagttttgcagagaaaagaatacagtcttttgaacacagttcttcgaaatttaaaagcagtgacgagtttaaggtagataaaagcatacctttagatgcacaaaatgcttcacttaacgacatggcgagtaagacagataacttaattaatcagctagaacaatttacaggagataagaaagaatccatttccgccaatctgaaaaacatccagttaatgattggtgatataatggaaaatagaaacaataggaatgataatttaaatttccatacttatgtcttggttgggaaaaatacaacatatgacgaaataagtaactattatggttttgctgagtttaaattttcaataaataatggcaatcttactcttaacaaccttataggccacccttatgtcgtcattaataaataccctgaatttagagattatttgataagaaatggagtcatcacccaacccgagcttgaaccatataacataaagaatgtggctcggtatcttggctctaaagcggtgagcagtgagattggttattatgaatccattccagctactaaagtgaagattctctcgtttactggagccaatccgattacgcaaaaattaggtaatacacttcagagtatctctgatcttttttcaaaaaaacgattttcggacgaaccgaatgacgccatcactcaggatgaactatttacccgtcagactgatttatatacttatgatgagatgataaatcatctaaaaactatagtaagaacgacattcacacctgttaaaccgatagaagaaatatccagtgaaaaaactgatgcggccattaaaggaataatgaccaatggggatgcggaaataatttccgaaaacattatcgagagcaaaaatagtttagaccatgatacaagttatttttctcatgaagttatttcagctgttgatcgtgcatatgaaaaagtaaactccgtgaaatctctttttgaacgtgcagaatctcagcctgagattaaatctcaattaaaatcattaattaatgaagccactggattgaatgatgaggttatcattgatattgataaagtagatgtttctagcatatcagacatggcctataacaggtttaaagataatatcaatactctacatgactatctctctaagcaaaaatcagggggttatacatcctttgttttatttaaatatcgccagtttaatccatccaagcctgatgcctttgcctaaggtacccttgaggtgctgtttcagggaccaggaggtagtggatctgcttggagccatccacagttcgaaaaaggtggaggttctggcggtggatcaggtggaagtgcatggtctcaccctcagtttgagaaataaggatccggctgctaacaaagcccgaaaggaagctgagttggctgctgccaccgctgagcaataactagcataaccccttggggcctctaaacgggtcttgaggggttttttgctgaaaggaggaactatatccggatatcccgcaagaggcccggcagtaccggcataaccaagcctatgcctacagcatccagggtgacggtgccgaggatgacgatgagcgcattgttagatttcatacacggtgcctgactgcgttagcaatttaactgtgataaactaccgcattaaagcttatcgatgataagctgtcaaacatgagaattcttgaagacgaaagggcctcgtgatacgcctatttttataggttaatgtcatgataataatggtttcttagacgtcaggtggcacttttcggggaaatgtgcgcggaacccctatttgtttatttttctaaatacattcaaatatgtatccgctcatgagacaataaccctgataaatgcttcaataatattgaaaaaggaagagtatgagtattcaacatttccgtgtcgcccttattcccttttttgcggcattttgccttcctgtttttgctcacccagaaacgctggtgaaagtaaaagatgctgaagatcagttgggtgcacgagtgggttacatcgaactggatctcaacagcggtaagatccttgagagttttcgccccgaagaacgttttccaatgatgagcacttttaaagttctgctatgtggcgcggtattatcccgtgttgacgccgggcaagagcaactcggtcgccgcatacactattctcagaatgacttggttgagtactcaccagtcacagaaaagcatcttacggatggcatgacagtaagagaattatgcagtgctgccataaccatgagtgataacactgcggccaacttacttctgacaacgatcggaggaccgaaggagctaaccgcttttttgcacaacatgggggatcatgtaactcgccttgatcgttgggaaccggagctgaatgaagccataccaaacgacgagcgtgacaccacgatgcctgcagcaatggcaacaacgttgcgcaaactattaactggcgaactacttactctagcttcccggcaacaattaatagactggatggaggcggataaagttgcaggaccacttctgcgctcggcccttccggctggctggtttattgctgataaatctggagccggtgagcgtgggtctcgcggtatcattgcagcactggggccagatggtaagccctcccgtatcgtagttatctacacgacggggagtcaggcaactatggatgaacgaaatagacagatcgctgagataggtgcctcactgattaagcattggtaactgtcagaccaagtttactcatatatactttagattgatttaaaacttcatttttaatttaaaaggatctaggtgaagatcctttttgataatctcatgaccaaaatcccttaacgtgagttttcgttccactgagcgtcagaccccgtagaaaagatcaaaggatcttcttgagatcctttttttctgcgcgtaatctgctgcttgcaaacaaaaaaaccaccgctaccagcggtggtttgtttgccggatcaagagctaccaactctttttccgaaggtaactggcttcagcagagcgcagataccaaatactgtccttctagtgtagccgtagttaggccaccacttcaagaactctgtagcaccgcctacatacctcgctctgctaatcctgttaccagtggctgctgccagtggcgataagtcgtgtcttaccgggttggactcaagacgatagttaccggataaggcgcagcggtcgggctgaacggggggttcgtgcacacagcccagcttggagcgaacgacctacaccgaactgagatacctacagcgtgagctatgagaaagcgccacgcttcccgaagggagaaaggcggacaggtatccggtaagcggcagggtcggaacaggagagcgcacgagggagcttccagggggaaacgcctggtatctttatagtcctgtcgggtttcgccacctctgacttgagcgtcgatttttgtgatgctcgtcaggggggcggagcctatggaaaaacgccagcaacgcggcctttttacggttcctggccttttgctggccttttgctcacatgttctttcctgcgttatcccctgattctgtggataaccgtattaccgcctttgagtgagctgataccgctcgccgcagccgaacgaccgagcgcagcgagtcagtgagcgaggaagcggaagagcgcctgatgcggtattttctccttacgcatctgtgcggtatttcacaccgcatatatggtgcactctcagtacaatctgctctgatgccgcatagttaagccagtatacactccgctatcgctacgtgactgggtcatggctgcgccccgacacccgccaacacccgctgacgcgccctgacgggcttgtctgctcccggcatccgcttacagacaagctgtgaccgtctccgggagctgcatgtgtcagaggttttcaccgtcatcaccgaaacgcgcgaggcagctgcggtaaagctcatcagcgtggtcgtgaagcgattcacagatgtctgcctgttcatccgcgtccagctcgttgagtttctccagaagcgttaatgtctggcttctgataaagcgggccatgttaagggcggttttttcctgtttggtcactgatgcctccgtgtaagggggatttctgttcatgggggtaatgataccgatgaaacgagagaggatgctcacgatacgggttactgatgatgaacatgcccggttactggaacgttgtgagggtaaacaactggcggtatggatgcggcgggaccagagaaaaatcactcagggtcaatgccagcgcttcgttaatacagatgtaggtgttccacagggtagccagcagcatcctgcgatgcagatccggaacataatggtgcagggcgctgacttccgcgtttccagactttacgaaacacggaaaccgaagaccattcatgttgttgctcaggtcgcagacgttttgcagcagcagtcgcttcacgttcgctcgcgtatcggtgattcattctgctaaccagtaaggcaaccccgccagcctagccgggtcctcaacgacaggagcacgatcatgcgcacccgtggccaggacccaacgctgcccgagatgcgccgcgtgcggctgctggagatggcggacgcgatggatatgttctgccaagggttggtttgcgcattcacagttctccgcaagaattgattggctccaattcttggagtggtgaatccgttagcgaggtgccgccggcttccattcaggtcgaggtggcccggctccatgcaccgcgacgcaacgcggggaggcagacaaggtatagggcggcgcctacaatccatgccaacccgttccatgtgctcgccgaggcggcataaatcgccgtgacgatcagcggtccagtgatcgaagttaggctggtaagagccgcgagcgatccttgaagctgtccctgatggtcgtcatctacctgcctggacagcatggcctgcaacgcgggcatcccgatgccgccggaagcgagaagaatcataatggggaaggccatccagcctcgcgtcgcgaacgccagcaagacgtagcccagcgcgtcggccgccatgccggcgataatggcctgcttctcgccgaaacgtttggtggcgggaccagtgacgaaggcttgagcgagggcgtgcaagattccgaataccgcaagcgacaggccgatcatcgtcgcgctccagcgaaagcggtcctcgccgaaaatgacccagagcgctgccggcacctgtcctacgagttgcatgataaagaagacagtcataagtgcggcgacgatagtcatgccccgcgcccaccggaaggagctgactgggttgaaggctctcaagggcatcggtcgagatcccggtgcctaatgagtgagctaacttacattaattgcgttgcgctcactgcccgctttccagtcgggaaacctgtcgtgccagctgcattaatgaatcggccaacgcgcggggagaggcggtttgcgtattgggcgccagggtggtttttcttttcaccagtgagacgggcaacagctgattgcccttcaccgcctggccctgagagagttgcagcaagcggtccacgctggtttgccccagcaggcgaaaatcctgtttgatggtggttaacggcgggatataacatgagctgtcttcggtatcgtcgtatcccactaccgagatatccgcaccaacgcgcagcccggactcggtaatggcgcgcattgcgcccagcgccatctgatcgttggcaaccagcatcgcagtgggaacgatgccctcattcagcatttgcatggtttgttgaaaaccggacatggcactccagtcgccttcccgttccgctatcggctgaatttgattgcgagtgagatatttatgccagccagccagacgcagacgcgccgagacagaacttaatgggcccgctaacagcgcgatttgctggtgacccaatgcgaccagatgctccacgcccagtcgcgtaccgtcttcatgggagaaaataatactgttgatgggtgtc

SEQ ID NO: 117 - protein, 1863 aa, Serratia entomophila
MPYSSESKEKETHSKETERDNADPVFQRVSQGGVGVSPPDEGGDLSAGSNNDHLFAFIRETHLEEAQEFRLKGYNSQVPEVDEGLLTQLRDDLAAAKSRQYVQASVGGPLGSRWLLEQIGKIERLTDKFSDEVIKRWVKHELPRKNVGEAAGTELGSRRRAQSLARRLESTMQTLIRVVHTLHAMDDYSTPEKRHDMLVAELTGAFSSSDKNTVIQALGRMTAETSGHAAWASLMQARTAAWEAGKSATVDAMIATSQHEAEKANKKARELQGDSQAFFSHVAAYLQSLSSDLAKVSINMGQSTSSSTIRNEAEKASELQGDSQTFVSHVAAYLQSLPSDLAKVPINMWQNMDFVKTKLQAQTAVAGMKVHAHRLVRIAQHGHSTKTPAKDPEQVVTDSIIRSILWLWQQPAIKIQCASTALLSKVGELKKIEGILASYAVTDELGNEQERRNPPGEEDLDAQLREWVSASLKQENPENQRAVKVVTLERLLGGDIASARNLVERLGKAEEGIQNLLRRQQVAVLKMSVERLPAAVSSLKAVDKLLPDLAGDLTASIAALSNALQAAEYPARDFSEAKIQAGYAQLWATKVKESLSAASARLTERPLDEHSRGARLAKHWANLAKERSVGNYPPPDAQQVLASLKEQGLLAGTLSTGDPAGYLFATRLAGELENAGNGELRLPMSPEQYVALEKGLVEYIVKWGQRRISQGVTRIVIELSFEQALDTVSFNVSKLFRLPYKVLKASIKIPYNVNKVNNYTMPGHDKPYKAIYGLLGKKLKQLGFNLLTAPVPGVMKLVAGTGITAGAGVHNLRVENREKTFSAVYQHVVEGKQSEKIKMDSVKSMIFDSVLDTATTAAFKGGRRAWQSGRNKNDIEINEVTLSQAQQRQVAANNVDTAWGNAAANERKVEPVSHSSPLQQQTDVRPFSDKSDQDAAQPRVRKRAVADMAPPPPHQWHNNIPANTTLQSEHFDFDRDIRYQGFSDEKKKQTYLHGIQLVLLQIQNDGRFAQKIRNNAYLASIGVSNLVPVDIEGYKLKNTFLLPDSPSAKSGVIVRLDSENPYYYVGKGSDLLEDIKWAMPHDANEQKYEYMPDSDGNAHFYRLRNGFDIFNDIRMGNSSFEYFFNYNNPEPISITRLSSYLANTIEGDYKNGSSPPKNKLLISRAITGAHIPDPGVTATAAGYHIEFTWDNLTSAEYLRSFSRPFSTLSGEMQLVSSSINGETIQETELHVHQAEYIGSWVDATVGAITSFTPEGWVLNTTLSAADIAADLTEDKDPDPMAVAGLVVGCIPGGRIAAKVGKFTRIGGKVVKYGLMLGNKAVDLAIVGKSVKIAVDTGDPLAIYKALLISGIGTTNSYDMAKNMSSKLKISKKLEDSVQLDKPLQNLRGGSKRPEEGESTSQKRSQPDESPENSQEAVYSGPSGRARVTFDQTTEHHIMLNRFSRLVLARSFAEKRIQSFEHSSSKFKSSDEFKVDKSIPLDAQNASLNDMASKTDNLINQLEQFTGDKKESISANLKNIQLMIGDIMENRNNRNDNLNFHTYVLVGKNTTYDEISNYYGFAEFKFSINNGNLTLNNLIGHPYVVINKYPEFRDYLIRNGVITQPELEPYNIKNVARYLGSKAVSSEIGYYESIPATKVKILSFTGANPITQKLGNTLQSISDLFSKKRFSDEPNDAITQDELFTRQTDLYTYDEMINHLKTIVRTTFTPVKPIEEISSEKTDAAIKGIMTNGDAEIISENIIESKNSLDHDTSYFSHEVISAVDRAYEKVNSVKSLFERAESQPEIKSQLKSLINEATGLNDEVIIDIDKVDVSSISDMAYNRFKDNINTLHDYLSKQKSGGYTSFVLFKYRQFNPSKPDAFA

SEQ ID NO: 118 - DNA, 10861 bp, Serratia entomophila
  source 1..10861: mol_type = other DNA
  CDS 933..6017: note = Afp18 C-terminal truncation E1694
tggtcagagacatcaagaaataacgccggaacattagtgcaggcagcttccacagcaatggcatcctggtcatccagcggatagttaatgatcagcccactgacgcgttgcgcgagaagattgtgcaccgccgctttacaggcttcgacgccgcttcgttctaccatcgacaccaccacgctggcacccagttgatcggcgcgagatttaatcgccgcgacaatttgcgacggcgcgtgcagggccagactggaggtggcaacgccaatcagcaacgactgtttgcccgccagttgttgtgccacgcggttgggaatgtaattcagctccgccatcgccgcttccactttttcccgcgttttcgcagaaacgtggctggcctggttcaccacgcgggaaacggtctgataagagacaccggcatactctgcgacatcgtataacgttactggtttcacattcaccaccctgaattgactctcttccgggcgctatcatgccataccgcgaaaggttttgcgccattcgatggtgtccgggatctcgacgctctcccttatgcgactcctgcattaggaagcagcccagtagtaggttgaggccgttgagcaccgccgccgcaaggaatggtgcatgcaaggagatggcgcccaacagtcccccggccacggggcctgccaccatacccacgccgaaacaagcgctcatgagcccgaagtggcgagcccgatcttccccatcggtgatgtcggcgatataggcgccagcaaccgcacctgtggcgccggtgatgccggccacgatgcgtccggcgtagaggatcgagatctcgatcccgcgaaattaatacgactcactataggggaattgtgagcggataacaattcccctctagaaataattttgtttaactttaagaaggagatatacatatgccttactccagtgagtcgaaggaaaaagaaacacactcaaaagaaaccgaaagagataatgctgacccagtatttcaacgggtcagccagggcggcgtgggtgtttcaccgcctgatgaggggggagacttgtcggccggaagtaacaatgaccatttattcgcttttattcgtgaaacacacttggaagaagcccaggaattcaggctaaaagggtataacagccaggtgcccgaggttgacgagggattactgacgcagctgcgtgacgacctggcggcggccaaatcccgccagtacgttcaggcaagcgttggggggccgctgggttctcggtggctgctggaacagataggcaaaatagagcggctgacggacaagttttctgacgaagtaataaaacgctgggttaagcatgagctgccacgaaaaaacgtaggggaagccgcggggaccgagttggggagccggcgtagggctcagtcgctggccagacggttggagtcaaccatgcagacactgatccgcgttgtccataccctgcatgctatggatgactacagtaccccggaaaaacggcacgacatgctggtcgctgagcttaccggcgcgttctcctccagtgataaaaatacggtgatacaggcgctggggagaatgacggcagagacgtcaggtcatgccgcctgggcttcccttatgcaggcccggacagcggcgtgggaggccggtaagtcagccaccgtcgatgcgatgattgcgacttcacagcacgaagcagaaaaagccaataaaaaagcccgtgagcttcagggcgattcacaggctttctttagtcatgtcgccgcctatcttcagagcctctccagcgatttggcaaaagtgtcgattaacatggggcagagcacctcttcctcgactatacggaacgaagcagaaaaagccagtgagcttcagggcgattcacagactttcgttagtcatgtcgccgcctatcttcagagcctccctagcgatttggcaaaagtgccgattaacatgtggcagaatatggattttgttaagacaaaattacaagcgcaaactgcagttgcgggaatgaaagtgcatgcgcaccggcttgtccggatcgcacagcatggtcactccaccaaaacccctgcgaaggatcccgaacaggtcgttaccgattccatcatcagaagcattttatggctgtggcagcagccggccatcaaaatccagtgcgccagcactgcgttgttgtcaaaagtgggtgagctgaaaaaaattgaggggatactggcttcttacgccgtgacggatgagctgggaaacgaacaagaacgccgcaaccctccgggtgaggaggacctggatgcacagctcagggaatgggtgagcgccagccttaagcaggaaaaccccgaaaaccagcgggcggtaaaagtggtgacgctggagcggctgctgggcggtgatatcgccagtgcccgcaacctggtggaacgtctgggaaaagcggaagagggtattcagaatctgctcaggcggcagcaggttgctgtcctgaaaatgtcagttgagcgcttgcctgccgctgtttcctctctgaaggccgtggataaattactgccggatttggcaggtgacctcacggcgagtatcgccgccctgagcaacgcccttcaggcagccgaataccccgcccgcgactttagcgaagcaaaaatacaggccggctatgcacaattgtgggcgacaaaggtgaaggaaagtctgtcggcagcgtctgcacggctgaccgaaagaccgctggatgaacattcacggggcgcacgccttgccaaacattgggcaaacctcgccaaagaacggagcgtgggtaattatccgccgccggatgcacagcaggtacttgcctccctgaaggaacaggggctattagcggggaccctttcaaccggagatccggccgggtatcttttcgccacccggcttgccggtgagcttgaaaatgccggtaatggtgaattgcgattaccgatgagtccggagcaatatgttgctttagagaagggacttgttgagtatattgtaaaatggggacaacggcggatctcacaaggagtcacccgcattgttattgagttgtcctttgagcaggctctggatacggtatcgttcaacgtgtccaagctcttccggttaccttataaggtgctgaaggcctcgataaaaataccgtacaatgtcaataaggttaataattataccatgccgggccatgataagccctataaggcaatttatggcttgctgggaaaaaagcttaagcaacttggctttaatttactgacggcacccgtgcctggcgtgatgaaacttgtggctggcaccgggataaccgcaggtgcaggcgtgcataatttacgtgtcgaaaatagagagaaaacattcagcgcggtttatcaacacgtggtggaaggaaagcaaagtgaaaaaataaaaatggactccgtgaagtcgatgatttttgattcagtgctcgataccgccactacggccgcttttaaagggggacgaagagcctggcaatcaggaagaaataaaaacgacattgaaatcaatgaggtaacactttctcaagcacagcagcgccaagtggcagccaacaatgttgacactgcatgggggaatgctgctgcgaatgagaggaaggttgagccagtgagtcattcatcaccattacagcaacaaaccgatgttaggccgttctctgataagagtgaccaggatgctgctcaacctcgagtacgtaaacgggcagtggcggatatggctccccctccccctcatcaatggcataataacattcctgccaacacgacgctacagtcagaacattttgattttgatcgtgacatacgttatcagggcttctccgatgagaagaaaaaacaaacctatttacatggtattcaacttgtattgcttcagatacaaaatgatggacgctttgcacagaagatcaggaataatgcctaccttgccagtataggcgtttcgaacttagtacctgtcgatatagaaggatataaacttaaaaatacatttcttcttcctgatagcccaagtgctaaatctggagttattgttcgcttagattctgaaaatccttattactatgttggcaaagggagtgatcttttagaagacatcaaatgggccatgcctcatgatgctaatgaacagaagtatgaatatatgcctgattctgatgggaacgctcacttttaccgtctgcgcaacggttttgatatctttaatgatattaggatggggaattcaagtttcgaatatttctttaattataataatccggagccgataagcatcacgagactttcttcatatcttgcaaatactattgagggtgactataaaaacggatcgtcgcccccaaaaaacaaactattaatttccagagcgattactggtgctcatattcctgacccaggggtcactgcaaccgccgctggatatcatatcgaattcacctgggataatttgacttcagcagagtatctgaggtcattttcaaggcccttctctaccctcagtggagaaatgcagttagtgtctagctccattaatggagaaacgatacaggaaacagagctgcatgttcatcaggctgaatatataggaagctgggttgatgctactgtcggggccatcacatctttcacgccggagggatgggttctcaataccacactatcggcagcggacattgctgctgatttgacagaagataaggatcctgacccaatggcggttgctggcctggttgtaggatgcattcctggtggtcggattgcagctaaagtcggaaagttcacccgtattggcggtaaggttgttaaatacgggcttatgcttggcaataaagcggtcgacctggccatcgtagggaagagcgttaagatagctgtagacacgggtgatccactcgcaatttataaggcgcttctgatcagtggcataggtactacgaattcttacgatatggcaaagaatatgtcatcaaagctaaaaatcagcaagaaactggaagacagtgttcaattagataaaccactacaaaatctaaggggaggaagcaagcgtcctgaagagggtgaatcaacctcgcagaagcgttcacagccagatgagagtccagaaaatagtcaggaggctgtatattcaggcccctccggcagagctcgggtgacttttgaccagacgaccgaacatcatataatgcttaatagattttccagacttgtgttagctagaagttttgcagagaaaagaatacagtcttttgaacacagttcttcgaaatttaaaagcagtgacgagtttaaggtagataaaagcatacctttagatgcacaaaatgcttcacttaacgacatggcgagtaagacagataacttaattaatcagctagaacaatttacaggagataagaaagaatccatttccgccaatctgaaaaacatccagttaatgattggtgatataatggaaaatagaaacaataggaatgataatttaaatttccatacttatgtcttggttgggaaaaatacaacatatgacgaaataagtaactattatggttttgctgagtttaaattttcaataaataatggcaatcttactcttaacaaccttataggccacccttatgtcgtcattaataaataccctgaatttagagattatttgataagaaatggagtcatcacccaacccgagcttgaaccatataacataaagaatgtggctcggtatcttggctctaaagcggtgagcagtgagattggttattatgaatccattccagctactaaagtgaagattctctcgtttactggagccaatccgattacgcaaaaattaggtaatacacttcagagtatctctgatcttttttcaaaaaaacgattttcggacgaaccgaatgacgccatcactcaggatgaactatttacccgtcagactgatttatatacttatgatgagtaaggtacccttgaggtgctgtttcagggaccaggaggtagtggatctgcttggagccatccacagttcgaaaaaggtggaggttctggcggtggatcaggtggaagtgcatggtctcaccctcagtttgagaaataaggatccggctgctaacaaagcccgaaaggaagctgagttggctgctgccaccgctgagcaataactagcataaccccttggggcctctaaacgggtcttgaggggttttttgctgaaaggaggaactatatccggatatcccgcaagaggcccggcagtaccggcataaccaagcctatgcctacagcatccagggtgacggtgccgaggatgacgatgagcgcattgttagatttcatacacggtgcctgactgcgttagcaatttaactgtgataaactaccgcattaaagcttatcgatgataagctgtcaaacatgagaattcttgaagacgaaagggcctcgtgatacgcctatttttataggttaatgtcatgataataatggtttcttagacgtcaggtggcacttttcggggaaatgtgcgcggaacccctatttgtttatttttctaaatacattcaaatatgtatccgctcatgagacaataaccctgataaatgcttcaataatattgaaaaaggaagagtatgagtattcaacatttccgtgtcgcccttattcccttttttgcggcattttgccttcctgtttttgctcacccagaaacgctggtgaaagtaaaagatgctgaagatcagttgggtgcacgagtgggttacatcgaactggatctcaacagcggtaagatccttgagagttttcgccccgaagaacgttttccaatgatgagcacttttaaagttctgctatgtggcgcggtattatcccgtgttgacgccgggcaagagcaactcggtcgccgcatacactattctcagaatgacttggttgagtactcaccagtcacagaaaagcatcttacggatggcatgacagtaagagaattatgcagtgctgccataaccatgagtgataacactgcggccaacttacttctgacaacgatcggaggaccgaaggagctaaccgcttttttgcacaacatgggggatcatgtaactcgccttgatcgttgggaaccggagctgaatgaagccataccaaacgacgagcgtgacaccacgatgcctgcagcaatggcaacaacgttgcgcaaactattaactggcgaactacttactctagcttcccggcaacaattaatagactggatggaggcggataaagttgcaggaccacttctgcgctcggcccttccggctggctggtttattgctgataaatctggagccggtgagcgtgggtctcgcggtatcattgcagcactggggccagatggtaagccctcccgtatcgtagttatctacacgacggggagtcaggcaactatggatgaacgaaatagacagatcgctgagataggtgcctcactgattaagcattggtaactgtcagaccaagtttactcatatatactttagattgatttaaaacttcatttttaatttaaaaggatctaggtgaagatcctttttgataatctcatgaccaaaatcccttaacgtgagttttcgttccactgagcgtcagaccccgtagaaaagatcaaaggatcttcttgagatcctttttttctgcgcgtaatctgctgcttgcaaacaaaaaaaccaccgctaccagcggtggtttgtttgccggatcaagagctaccaactctttttccgaaggtaactggcttcagcagagcgcagataccaaatactgtccttctagtgtagccgtagttaggccaccacttcaagaactctgtagcaccgcctacatacctcgctctgctaatcctgttaccagtggctgctgccagtggcgataagtcgtgtcttaccgggttggactcaagacgatagttaccggataaggcgcagcggtcgggctgaacggggggttcgtgcacacagcccagcttggagcgaacgacctacaccgaactgagatacctacagcgtgagctatgagaaagcgccacgcttcccgaagggagaaaggcggacaggtatccggtaagcggcagggtcggaacaggagagcgcacgagggagcttccagggggaaacgcctggtatctttatagtcctgtcgggtttcgccacctctgacttgagcgtcgatttttgtgatgctcgtcaggggggcggagcctatggaaaaacgccagcaacgcggcctttttacggttcctggccttttgctggccttttgctcacatgttctttcctgcgttatcccctgattctgtggataaccgtattaccgcctttgagtgagctgataccgctcgccgcagccgaacgaccgagcgcagcgagtcagtgagcgaggaagcggaagagcgcctgatgcggtattttctccttacgcatctgtgcggtatttcacaccgcatatatggtgcactctcagtacaatctgctctgatgccgcatagttaagccagtatacactccgctatcgctacgtgactgggtcatggctgcgccccgacacccgccaacacccgctgacgcgccctgacgggcttgtctgctcccggcatccgcttacagacaagctgtgaccgtctccgggagctgcatgtgtcagaggttttcaccgtcatcaccgaaacgcgcgaggcagctgcggtaaagctcatcagcgtggtcgtgaagcgattcacagatgtctgcctgttcatccgcgtccagctcgttgagtttctccagaagcgttaatgtctggcttctgataaagcgggccatgttaagggcggttttttcctgtttggtcactgatgcctccgtgtaagggggatttctgttcatgggggtaatgataccgatgaaacgagagaggatgctcacgatacgggttactgatgatgaacatgcccggttactggaacgttgtgagggtaaacaactggcggtatggatgcggcgggaccagagaaaaatcactcagggtcaatgccagcgcttcgttaatacagatgtaggtgttccacagggtagccagcagcatcctgcgatgcagatccggaacataatggtgcagggcgctgacttccgcgtttccagactttacgaaacacggaaaccgaagaccattcatgttgttgctcaggtcgcagacgttttgcagcagcagtcgcttcacgttcgctcgcgtatcggtgattcattctgctaaccagtaaggcaaccccgccagcctagccgggtcctcaacgacaggagcacgatcatgcgcacccgtggccaggacccaacgctgcccgagatgcgccgcgtgcggctgctggagatggcggacgcgatggatatgttctgccaagggttggtttgcgcattcacagttctccgcaagaattgattggctccaattcttggagtggtgaatccgttagcgaggtgccgccggcttccattcaggtcgaggtggcccggctccatgcaccgcgacgcaacgcggggaggcagacaaggtatagggcggcgcctacaatccatgccaacccgttccatgtgctcgccgaggcggcataaatcgccgtgacgatcagcggtccagtgatcgaagttaggctggtaagagccgcgagcgatccttgaagctgtccctgatggtcgtcatctacctgcctggacagcatggcctgcaacgcgggcatcccgatgccgccggaagcgagaagaatcataatggggaaggccatccagcctcgcgtcgcgaacgccagcaagacgtagcccagcgcgtcggccgccatgccggcgataatggcctgcttctcgccgaaacgtttggtggcgggaccagtgacgaaggcttgagcgagggcgtgcaagattccgaataccgcaagcgacaggccgatcatcgtcgcgctccagcgaaagcggtcctcgccgaaaatgacccagagcgctgccggcacctgtcctacgagttgcatgataaagaagacagtcataagtgcggcgacgatagtcatgccccgcgcccaccggaaggagctgactgggttgaaggctctcaagggcatcggtcgagatcccggtgcctaatgagtgagctaacttacattaattgcgttgcgctcactgcccgctttccagtcgggaaacctgtcgtgccagctgcattaatgaatcggccaacgcgcggggagaggcggtttgcgtattgggcgccagggtggtttttcttttcaccagtgagacgggcaacagctgattgcccttcaccgcctggccctgagagagttgcagcaagcggtccacgctggtttgccccagcaggcgaaaatcctgtttgatggtggttaacggcgggatataacatgagctgtcttcggtatcgtcgtatcccactaccgagatatccgcaccaacgcgcagcccggactcggtaatggcgcgcattgcgcccagcgccatctgatcgttggcaaccagcatcgcagtgggaacgatgccctcattcagcatttgcatggtttgttgaaaaccggacatggcactccagtcgccttcccgttccgctatcggctgaatttgattgcgagtgagatatttatgccagccagccagacgcagacgcgccgagacagaacttaatgggcccgctaacagcgcgatttgctggtgacccaatgcgaccagatgctccacgcccagtcgcgtaccgtcttcatgggagaaaataatactgttgatgggtgtc

SEQ ID NO: 119 - protein, 1694 aa, Serratia entomophila
MPYSSESKEKETHSKETERDNADPVFQRVSQGGVGVSPPDEGGDLSAGSNNDHLFAFIRETHLEEAQEFRLKGYNSQVPEVDEGLLTQLRDDLAAAKSRQYVQASVGGPLGSRWLLEQIGKIERLTDKFSDEVIKRWVKHELPRKNVGEAAGTELGSRRRAQSLARRLESTMQTLIRVVHTLHAMDDYSTPEKRHDMLVAELTGAFSSSDKNTVIQALGRMTAETSGHAAWASLMQARTAAWEAGKSATVDAMIATSQHEAEKANKKARELQGDSQAFFSHVAAYLQSLSSDLAKVSINMGQSTSSSTIRNEAEKASELQGDSQTFVSHVAAYLQSLPSDLAKVPINMWQNMDFVKTKLQAQTAVAGMKVHAHRLVRIAQHGHSTKTPAKDPEQVVTDSIIRSILWLWQQPAIKIQCASTALLSKVGELKKIEGILASYAVTDELGNEQERRNPPGEEDLDAQLREWVSASLKQENPENQRAVKVVTLERLLGGDIASARNLVERLGKAEEGIQNLLRRQQVAVLKMSVERLPAAVSSLKAVDKLLPDLAGDLTASIAALSNALQAAEYPARDFSEAKIQAGYAQLWATKVKESLSAASARLTERPLDEHSRGARLAKHWANLAKERSVGNYPPPDAQQVLASLKEQGLLAGTLSTGDPAGYLFATRLAGELENAGNGELRLPMSPEQYVALEKGLVEYIVKWGQRRISQGVTRIVIELSFEQALDTVSFNVSKLFRLPYKVLKASIKIPYNVNKVNNYTMPGHDKPYKAIYGLLGKKLKQLGFNLLTAPVPGVMKLVAGTGITAGAGVHNLRVENREKTFSAVYQHVVEGKQSEKIKMDSVKSMIFDSVLDTATTAAFKGGRRAWQSGRNKNDIEINEVTLSQAQQRQVAANNVDTAWGNAAANERKVEPVSHSSPLQQQTDVRPFSDKSDQDAAQPRVRKRAVADMAPPPPHQWHNNIPANTTLQSEHFDFDRDIRYQGFSDEKKKQTYLHGIQLVLLQIQNDGRFAQKIRNNAYLASIGVSNLVPVDIEGYKLKNTFLLPDSPSAKSGVIVRLDSENPYYYVGKGSDLLEDIKWAMPHDANEQKYEYMPDSDGNAHFYRLRNGFDIFNDIRMGNSSFEYFFNYNNPEPISITRLSSYLANTIEGDYKNGSSPPKNKLLISRAITGAHIPDPGVTATAAGYHIEFTWDNLTSAEYLRSFSRPFSTLSGEMQLVSSSINGETIQETELHVHQAEYIGSWVDATVGAITSFTPEGWVLNTTLSAADIAADLTEDKDPDPMAVAGLVVGCIPGGRIAAKVGKFTRIGGKVVKYGLMLGNKAVDLAIVGKSVKIAVDTGDPLAIYKALLISGIGTTNSYDMAKNMSSKLKISKKLEDSVQLDKPLQNLRGGSKRPEEGESTSQKRSQPDESPENSQEAVYSGPSGRARVTFDQTTEHHIMLNRFSRLVLARSFAEKRIQSFEHSSSKFKSSDEFKVDKSIPLDAQNASLNDMASKTDNLINQLEQFTGDKKESISANLKNIQLMIGDIMENRNNRNDNLNFHTYVLVGKNTTYDEISNYYGFAEFKFSINNGNLTLNNLIGHPYVVINKYPEFRDYLIRNGVITQPELEPYNIKNVARYLGSKAVSSEIGYYESIPATKVKILSFTGANPITQKLGNTLQSISDLFSKKRFSDEPNDAITQDELFTRQTDLYTYDE

SEQ ID NO: 120 - DNA, 10090 bp, Serratia entomophila
  source 1..10090: mol_type = other DNA
  CDS 933..5246: note = Afp18 C-terminal truncation I1437
tggtcagagacatcaagaaataacgccggaacattagtgcaggcagcttccacagcaatggcatcctggtcatccagcggatagttaatgatcagcccactgacgcgttgcgcgagaagattgtgcaccgccgctttacaggcttcgacgccgcttcgttctaccatcgacaccaccacgctggcacccagttgatcggcgcgagatttaatcgccgcgacaatttgcgacggcgcgtgcagggccagactggaggtggcaacgccaatcagcaacgactgtttgcccgccagttgttgtgccacgcggttgggaatgtaattcagctccgccatcgccgcttccactttttcccgcgttttcgcagaaacgtggctggcctggttcaccacgcgggaaacggtctgataagagacaccggcatactctgcgacatcgtataacgttactggtttcacattcaccaccctgaattgactctcttccgggcgctatcatgccataccgcgaaaggttttgcgccattcgatggtgtccgggatctcgacgctctcccttatgcgactcctgcattaggaagcagcccagtagtaggttgaggccgttgagcaccgccgccgcaaggaatggtgcatgcaaggagatggcgcccaacagtcccccggccacggggcctgccaccatacccacgccgaaacaagcgctcatgagcccgaagtggcgagcccgatcttccccatcggtgatgtcggcgatataggcgccagcaaccgcacctgtggcgccggtgatgccggccacgatgcgtccggcgtagaggatcgagatctcgatcccgcgaaattaatacgactcactataggggaattgtgagcggataacaattcccctctagaaataattttgtttaactttaagaaggagatatacatatgccttactccagtgagtcgaaggaaaaagaaacacactcaaaagaaaccgaaagagataatgctgacccagtatttcaacgggtcagccagggcggcgtgggtgtttcaccgcctgatgaggggggagacttgtcggccggaagtaacaatgaccatttattcgcttttattcgtgaaacacacttggaagaagcccaggaattcaggctaaaagggtataacagccaggtgcccgaggttgacgagggattactgacgcagctgcgtgacgacctggcggcggccaaatcccgccagtacgttcaggcaagcgttggggggccgctgggttctcggtggctgctggaacagataggcaaaatagagcggctgacggacaagttttctgacgaagtaataaaacgctgggttaagcatgagctgccacgaaaaaacgtaggggaagccgcggggaccgagttggggagccggcgtagggctcagtcgctggccagacggttggagtcaaccatgcagacactgatccgcgttgtccataccctgcatgctatggatgactacagtaccccggaaaaacggcacgacatgctggtcgctgagcttaccggcgcgttctcctccagtgataaaaatacggtgatacaggcgctggggagaatgacggcagagacgtcaggtcatgccgcctgggcttcccttatgcaggcccggacagcggcgtgggaggccggtaagtcagccaccgtcgatgcgatgattgcgacttcacagcacgaagcagaaaaagccaataaaaaagcccgtgagcttcagggcgattcacaggctttctttagtcatgtcgccgcctatcttcagagcctctccagcgatttggcaaaagtgtcgattaacatggggcagagcacctcttcctcgactatacggaacgaagcagaaaaagccagtgagcttcagggcgattcacagactttcgttagtcatgtcgccgcctatcttcagagcctccctagcgatttggcaaaagtgccgattaacatgtggcagaatatggattttgttaagacaaaattacaagcgcaaactgcagttgcgggaatgaaagtgcatgcgcaccggcttgtccggatcgcacagcatggtcactccaccaaaacccctgcgaaggatcccgaacaggtcgttaccgattccatcatcagaagcattttatggctgtggcagcagccggccatcaaaatccagtgcgccagcactgcgttgttgtcaaaagtgggtgagctgaaaaaaattgaggggatactggcttcttacgccgtgacggatgagctgggaaacgaacaagaacgccgcaaccctccgggtgaggaggacctggatgcacagctcagggaatgggtgagcgccagccttaagcaggaaaaccccgaaaaccagcgggcggtaaaagtggtgacgctggagcggctgctgggcggtgatatcgccagtgcccgcaacctggtggaacgtctgggaaaagcggaagagggtattcagaatctgctcaggcggcagcaggttgctgtcctgaaaatgtcagttgagcgcttgcctgccgctgtttcctctctgaaggccgtggataaattactgccggatttggcaggtgacctcacggcgagtatcgccgccctgagcaacgcccttcaggcagccgaataccccgcccgcgactttagcgaagcaaaaatacaggccggctatgcacaattgtgggcgacaaaggtgaaggaaagtctgtcggcagcgtctgcacggctgaccgaaagaccgctggatgaacattcacggggcgcacgccttgccaaacattgggcaaacctcgccaaagaacggagcgtgggtaattatccgccgccggatgcacagcaggtacttgcctccctgaaggaacaggggctattagcggggaccctttcaaccggagatccggccgggtatcttttcgccacccggcttgccggtgagcttgaaaatgccggtaatggtgaattgcgattaccgatgagtccggagcaatatgttgctttagagaagggacttgttgagtatattgtaaaatggggacaacggcggatctcacaaggagtcacccgcattgttattgagttgtcctttgagcaggctctggatacggtatcgttcaacgtgtccaagctcttccggttaccttataaggtgctgaaggcctcgataaaaataccgtacaatgtcaataaggttaataattataccatgccgggccatgataagccctataaggcaatttatggcttgctgggaaaaaagcttaagcaacttggctttaatttactgacggcacccgtgcctggcgtgatgaaacttgtggctggcaccgggataaccgcaggtgcaggcgtgcataatttacgtgtcgaaaatagagagaaaacattcagcgcggtttatcaacacgtggtggaaggaaagcaaagtgaaaaaataaaaatggactccgtgaagtcgatgatttttgattcagtgctcgataccgccactacggccgcttttaaagggggacgaagagcctggcaatcaggaagaaataaaaacgacattgaaatcaatgaggtaacactttctcaagcacagcagcgccaagtggcagccaacaatgttgacactgcatgggggaatgctgctgcgaatgagaggaaggttgagccagtgagtcattcatcaccattacagcaacaaaccgatgttaggccgttctctgataagagtgaccaggatgctgctcaacctcgagtacgtaaacgggcagtggcggatatggctccccctccccctcatcaatggcataataacattcctgccaacacgacgctacagtcagaacattttgattttgatcgtgacatacgttatcagggcttctccgatgagaagaaaaaacaaacctatttacatggtattcaacttgtattgcttcagatacaaaatgatggacgctttgcacagaagatcaggaataatgcctaccttgccagtataggcgtttcgaacttagtacctgtcgatatagaaggatataaacttaaaaatacatttcttcttcctgatagcccaagtgctaaatctggagttattgttcgcttagattctgaaaatccttattactatgttggcaaagggagtgatcttttagaagacatcaaatgggccatgcctcatgatgctaatgaacagaagtatgaatatatgcctgattctgatgggaacgctcacttttaccgtctgcgcaacggttttgatatctttaatgatattaggatggggaattcaagtttcgaatatttctttaattataataatccggagccgataagcatcacgagactttcttcatatcttgcaaatactattgagggtgactataaaaacggatcgtcgcccccaaaaaacaaactattaatttccagagcgattactggtgctcatattcctgacccaggggtcactgcaaccgccgctggatatcatatcgaattcacctgggataatttgacttcagcagagtatctgaggtcattttcaaggcccttctctaccctcagtggagaaatgcagttagtgtctagctccattaatggagaaacgatacaggaaacagagctgcatgttcatcaggctgaatatataggaagctgggttgatgctactgtcggggccatcacatctttcacgccggagggatgggttctcaataccacactatcggcagcggacattgctgctgatttgacagaagataaggatcctgacccaatggcggttgctggcctggttgtaggatgcattcctggtggtcggattgcagctaaagtcggaaagttcacccgtattggcggtaaggttgttaaatacgggcttatgcttggcaataaagcggtcgacctggccatcgtagggaagagcgttaagatagctgtagacacgggtgatccactcgcaatttataaggcgcttctgatcagtggcataggtactacgaattcttacgatatggcaaagaatatgtcatcaaagctaaaaatcagcaagaaactggaagacagtgttcaattagataaaccactacaaaatctaaggggaggaagcaagcgtcctgaagagggtgaatcaacctcgcagaagcgttcacagccagatgagagtccagaaaatagtcaggaggctgtatattcaggcccctccggcagagctcgggtgacttttgaccagacgaccgaacatcatatataaggtacccttgaggtgctgtttcagggaccaggaggtagtggatctgcttggagccatccacagttcgaaaaaggtggaggttctggcggtggatcaggtggaagtgcatggtctcaccctcagtttgagaaataaggatccggctgctaacaaagcccgaaaggaagctgagttggctgctgccaccgctgagcaataactagcataaccccttggggcctctaaacgggtcttgaggggttttttgctgaaaggaggaactatatccggatatcccgcaagaggcccggcagtaccggcataaccaagcctatgcctacagcatccagggtgacggtgccgaggatgacgatgagcgcattgttagatttcatacacggtgcctgactgcgttagcaatttaactgtgataaactaccgcattaaagcttatcgatgataagctgtcaaacatgagaattcttgaagacgaaagggcctcgtgatacgcctatttttataggttaatgtcatgataataatggtttcttagacgtcaggtggcacttttcggggaaatgtgcgcggaacccctatttgtttatttttctaaatacattcaaatatgtatccgctcatgagacaataaccctgataaatgcttcaataatattgaaaaaggaagagtatgagtattcaacatttccgtgtcgcccttattcccttttttgcggcattttgccttcctgtttttgctcacccagaaacgctggtgaaagtaaaagatgctgaagatcagttgggtgcacgagtgggttacatcgaactggatctcaacagcggtaagatccttgagagttttcgccccgaagaacgttttccaatgatgagcacttttaaagttctgctatgtggcgcggtattatcccgtgttgacgccgggcaagagcaactcggtcgccgcatacactattctcagaatgacttggttgagtactcaccagtcacagaaaagcatcttacggatggcatgacagtaagagaattatgcagtgctgccataaccatgagtgataacactgcggccaacttacttctgacaacgatcggaggaccgaaggagctaaccgcttttttgcacaacatgggggatcatgtaactcgccttgatcgttgggaaccggagctgaatgaagccataccaaacgacgagcgtgacaccacgatgcctgcagcaatggcaacaacgttgcgcaaactattaactggcgaactacttactctagcttcccggcaacaattaatagactggatggaggcggataaagttgcaggaccacttctgcgctcggcccttccggctggctggtttattgctgataaatctggagccggtgagcgtgggtctcgcggtatcattgcagcactggggccagatggtaagccctcccgtatcgtagttatctacacgacggggagtcaggcaactatggatgaacgaaatagacagatcgctgagataggtgcctcactgattaagcattggtaactgtcagaccaagtttactcatatatactttagattgatttaaaacttcatttttaatttaaaaggatctaggtgaagatcctttttgataatctcatgaccaaaatcccttaacgtgagttttcgttccactgagcgtcagaccccgtagaaaagatcaaaggatcttcttgagatcctttttttctgcgcgtaatctgctgcttgcaaacaaaaaaaccaccgctaccagcggtggtttgtttgccggatcaagagctaccaactctttttccgaaggtaactggcttcagcagagcgcagataccaaatactgtccttctagtgtagccgtagttaggccaccacttcaagaactctgtagcaccgcctacatacctcgctctgctaatcctgttaccagtggctgctgccagtggcgataagtcgtgtcttaccgggttggactcaagacgatagttaccggataaggcgcagcggtcgggctgaacggggggttcgtgcacacagcccagcttggagcgaacgacctacaccgaactgagatacctacagcgtgagctatgagaaagcgccacgcttcccgaagggagaaaggcggacaggtatccggtaagcggcagggtcggaacaggagagcgcacgagggagcttccagggggaaacgcctggtatctttatagtcctgtcgggtttcgccacctctgacttgagcgtcgatttttgtgatgctcgtcaggggggcggagcctatggaaaaacgccagcaacgcggcctttttacggttcctggccttttgctggccttttgctcacatgttctttcctgcgttatcccctgattctgtggataaccgtattaccgcctttgagtgagctgataccgctcgccgcagccgaacgaccgagcgcagcgagtcagtgagcgaggaagcggaagagcgcctgatgcggtattttctccttacgcatctgtgcggtatttcacaccgcatatatggtgcactctcagtacaatctgctctgatgccgcatagttaagccagtatacactccgctatcgctacgtgactgggtcatggctgcgccccgacacccgccaacacccgctgacgcgccctgacgggcttgtctgctcccggcatccgcttacagacaagctgtgaccgtctccgggagctgcatgtgtcagaggttttcaccgtcatcaccgaaacgcgcgaggcagctgcggtaaagctcatcagcgtggtcgtgaagcgattcacagatgtctgcctgttcatccgcgtccagctcgttgagtttctccagaagcgttaatgtctggcttctgataaagcgggccatgttaagggcggttttttcctgtttggtcactgatgcctccgtgtaagggggatttctgttcatgggggtaatgataccgatgaaacgagagaggatgctcacgatacgggttactgatgatgaacatgcccggttactggaacgttgtgagggtaaacaactggcggtatggatgcggcgggaccagagaaaaatcactcagggtcaatgccagcgcttcgttaatacagatgtaggtgttccacagggtagccagcagcatcctgcgatgcagatccggaacataatggtgcagggcgctgacttccgcgtttccagactttacgaaacacggaaaccgaagaccattcatgttgttgctcaggtcgcagacgttttgcagcagcagtcgcttcacgttcgctcgcgtatcggtgattcattctgctaaccagtaaggcaaccccgccagcctagccgggtcctcaacgacaggagcacgatcatgcgcacccgtggccaggacccaacgctgcccgagatgcgccgcgtgcggctgctggagatggcggacgcgatggatatgttctgccaagggttggtttgcgcattcacagttctccgcaagaattgattggctccaattcttggagtggtgaatccgttagcgaggtgccgccggcttccattcaggtcgaggtggcccggctccatgcaccgcgacgcaacgcggggaggcagacaaggtatagggcggcgcctacaatccatgccaacccgttccatgtgctcgccgaggcggcataaatcgccgtgacgatcagcggtccagtgatcgaagttaggctggtaagagccgcgagcgatccttgaagctgtccctgatggtcgtcatctacctgcctggacagcatggcctgcaacgcgggcatcccgatgccgccggaagcgagaagaatcataatggggaaggccatccagcctcgcgtcgcgaacgccagcaagacgtagcccagcgcgtcggccgccatgccggcgataatggcctgcttctcgccgaaacgtttggtggcgggaccagtgacgaaggcttgagcgagggcgtgcaagattccgaataccgcaagcgacaggccgatcatcgtcgcgctccagcgaaagcggtcctcgccgaaaatgacccagagcgctgccggcacctgtcctacgagttgcatgataaagaagacagtcataagtgcggcgacgatagtcatgccccgcgcccaccggaaggagctgactgggttgaaggctctcaagggcatcggtcgagatcccggtgcctaatgagtgagctaacttacattaattgcgttgcgctcactgcccgctttccagtcgggaaacctgtcgtgccagctgcattaatgaatcggccaacgcgcggggagaggcggtttgcgtattgggcgccagggtggtttttcttttcaccagtgagacgggcaacagctgattgcccttcaccgcctggccctgagagagttgcagcaagcggtccacgctggtttgccccagcaggcgaaaatcctgtttgatggtggttaacggcgggatataacatgagctgtcttcggtatcgtcgtatcccactaccgagatatccgcaccaacgcgcagcccggactcggtaatggcgcgcattgcgcccagcgccatctgatcgttggcaaccagcatcgcagtgggaacgatgccctcattcagcatttgcatggtttgttgaaaaccggacatggcactccagtcgccttcccgttccgctatcggctgaatttgattgcgagtgagatatttatgccagccagccagacgcagacgcgccgagacagaacttaatgggcccgctaacagcgcgatttgctggtgacccaatgcgaccagatgctccacgcccagtcgcgtaccgtcttcatgggagaaaataatactgttgatgggtgtc

SEQ ID NO: 121 - protein, 1437 aa, Serratia entomophila; identical to SEQ ID NO: 38

SEQ ID NO: 122 - DNA, 7357 bp, Serratia entomophila
  source 1..7357: mol_type = other DNA
  CDS 933..2513: note = Afp18 C-terminal truncation K526
tggtcagagacatcaagaaataacgccggaacattagtgcaggcagcttccacagcaatggcatcctggtcatccagcggatagttaatgatcagcccactgacgcgttgcgcgagaagattgtgcaccgccgctttacaggcttcgacgccgcttcgttctaccatcgacaccaccacgctggcacccagttgatcggcgcgagatttaatcgccgcgacaatttgcgacggcgcgtgcagggccagactggaggtggcaacgccaatcagcaacgactgtttgcccgccagttgttgtgccacgcggttgggaatgtaattcagctccgccatcgccgcttccactttttcccgcgttttcgcagaaacgtggctggcctggttcaccacgcgggaaacggtctgataagagacaccggcatactctgcgacatcgtataacgttactggtttcacattcaccaccctgaattgactctcttccgggcgctatcatgccataccgcgaaaggttttgcgccattcgatggtgtccgggatctcgacgctctcccttatgcgactcctgcattaggaagcagcccagtagtaggttgaggccgttgagcaccgccgccgcaaggaatggtgcatgcaaggagatggcgcccaacagtcccccggccacggggcctgccaccatacccacgccgaaacaagcgctcatgagcccgaagtggcgagcccgatcttccccatcggtgatgtcggcgatataggcgccagcaaccgcacctgtggcgccggtgatgccggccacgatgcgtccggcgtagaggatcgagatctcgatcccgcgaaattaatacgactcactataggggaattgtgagcggataacaattcccctctagaaataattttgtttaactttaagaaggagatatacatatgccttactccagtgagtcgaaggaaaaagaaacacactcaaaagaaaccgaaagagataatgctgacccagtatttcaacgggtcagccagggcggcgtgggtgtttcaccgcctgatgaggggggagacttgtcggccggaagtaacaatgaccatttattcgcttttattcgtgaaacacacttggaagaagcccaggaattcaggctaaaagggtataacagccaggtgcccgaggttgacgagggattactgacgcagctgcgtgacgacctggcggcggccaaatcccgccagtacgttcaggcaagcgttggggggccgctgggttctcggtggctgctggaacagataggcaaaatagagcggctgacggacaagttttctgacgaagtaataaaacgctgggttaagcatgagctgccacgaaaaaacgtaggggaagccgcggggaccgagttggggagccggcgtagggctcagtcgctggccagacggttggagtcaaccatgcagacactgatccgcgttgtccataccctgcatgctatggatgactacagtaccccggaaaaacggcacgacatgctggtcgctgagcttaccggcgcgttctcctccagtgataaaaatacggtgatacaggcgctggggagaatgacggcagagacgtcaggtcatgccgcctgggcttcccttatgcaggcccggacagcggcgtgggaggccggtaagtcagccaccgtcgatgcgatgattgcgacttcacagcacgaagcagaaaaagccaataaaaaagcccgtgagcttcagggcgattcacaggctttctttagtcatgtcgccgcctatcttcagagcctctccagcgatttggcaaaagtgtcgattaacatggggcagagcacctcttcctcgactatacggaacgaagcagaaaaagccagtgagcttcagggcgattcacagactttcgttagtcatgtcgccgcctatcttcagagcctccctagcgatttggcaaaagtgccgattaacatgtggcagaatatggattttgttaagacaaaattacaagcgcaaactgcagttgcgggaatgaaagtgcatgcgcaccggcttgtccggatcgcacagcatggtcactccaccaaaacccctgcgaaggatcccgaacaggtcgttaccgattccatcatcagaagcattttatggctgtggcagcagccggccatcaaaatccagtgcgccagcactgcgttgttgtcaaaagtgggtgagctgaaaaaaattgaggggatactggcttcttacgccgtgacggatgagctgggaaacgaacaagaacgccgcaaccctccgggtgaggaggacctggatgcacagctcagggaatgggtgagcgccagccttaagcaggaaaaccccgaaaaccagcgggcggtaaaagtggtgacgctggagcggctgctgggcggtgatatcgccagtgcccgcaacctggtggaacgtctgggaaaagcggaagagggtattcagaatctgctcaggcggcagcaggttgctgtcctgaaataaggtacccttgaggtgctgtttcagggaccaggaggtagtggatctgcttggagccatccacagttcgaaaaaggtggaggttctggcggtggatcaggtggaagtgcatggtctcaccctcagtttgagaaataaggatccggctgctaacaaagcccgaaaggaagctgagttggctgctgccaccgctgagcaataactagcataaccccttggggcctctaaacgggtcttgaggggttttttgctgaaaggaggaactatatccggatatcccgcaagaggcccggcagtaccggcataaccaagcctatgcctacagcatccagggtgacggtgccgaggatgacgatgagcgcattgttagatttcatacacggtgcctgactgcgttagcaatttaactgtgataaactaccgcattaaagcttatcgatgataagctgtcaaacatgagaattcttgaagacgaaagggcctcgtgatacgcctatttttataggttaatgtcatgataataatggtttcttagacgtcaggtggcacttttcggggaaatgtgcgcggaacccctatttgtttatttttctaaatacattcaaatatgtatccgctcatgagacaataaccctgataaatgcttcaataatattgaaaaaggaagagtatgagtattcaacatttccgtgtcgcccttattcccttttttgcggcattttgccttcctgtttttgctcacccagaaacgctggtgaaagtaaaagatgctgaagatcagttgggtgcacgagtgggttacatcgaactggatctcaacagcggtaagatccttgagagttttcgccccgaagaacgttttccaatgatgagcacttttaaagttctgctatgtggcgcggtattatcccgtgttgacgccgggcaagagcaactcggtcgccgcatacactattctcagaatgacttggttgagtactcaccagtcacagaaaagcatcttacggatggcatgacagtaagagaattatgcagtgctgccataaccatgagtgataacactgcggccaacttacttctgacaacgatcggaggaccgaaggagctaaccgcttttttgcacaacatgggggatcatgtaactcgccttgatcgttgggaaccggagctgaatgaagccataccaaacgacgagcgtgacaccacgatgcctgcagcaatggcaacaacgttgcgcaaactattaactggcgaactacttactctagcttcccggcaacaattaatagactggatggaggcggataaagttgcaggaccacttctgcgctcggcccttccggctggctggtttattgctgataaatctggagccggtgagcgtgggtctcgcggtatcattgcagcactggggccagatggtaagccctcccgtatcgtagttatctacacgacggggagtcaggcaactatggatgaacgaaatagacagatcgctgagataggtgcctcactgattaagcattggtaactgtcagaccaagtttactcatatatactttagattgatttaaaacttcatttttaatttaaaaggatctaggtgaagatcctttttgataatctcatgaccaaaatcccttaacgtgagttttcgttccactgagcgtcagaccccgtagaaaagatcaaaggatcttcttgagatcctttttttctgcgcgtaatctgctgcttgcaaacaaaaaaaccaccgctaccagcggtggtttgtttgccggatcaagagctaccaactctttttccgaaggtaactggcttcagcagagcgcagataccaaatactgtccttctagtgtagccgtagttaggccaccacttcaagaactctgtagcaccgcctacatacctcgctctgctaatcctgttaccagtggctgctgccagtggcgataagtcgtgtcttaccgggttggactcaagacgatagttaccggataaggcgcagcggtcgggctgaacggggggttcgtgcacacagcccagcttggagcgaacgacctacaccgaactgagatacctacagcgtgagctatgagaaagcgccacgcttcccgaagggagaaaggcggacaggtatccggtaagcggcagggtcggaacaggagagcgcacgagggagcttccagggggaaacgcctggtatctttatagtcctgtcgggtttcgccacctctgacttgagcgtcgatttttgtgatgctcgtcaggggggcggagcctatggaaaaacgccagcaacgcggcctttttacggttcctggccttttgctggccttttgctcacatgttctttcctgcgttatcccctgattctgtggataaccgtattaccgcctttgagtgagctgataccgctcgccgcagccgaacgaccgagcgcagcgagtcagtgagcgaggaagcggaagagcgcctgatgcggtattttctccttacgcatctgtgcggtatttcacaccgcatatatggtgcactctcagtacaatctgctctgatgccgcatagttaagccagtatacactccgctatcgctacgtgactgggtcatggctgcgccccgacacccgccaacacccgctgacgcgccctgacgggcttgtctgctcccggcatccgcttacagacaagctgtgaccgtctccgggagctgcatgtgtcagaggttttcaccgtcatcaccgaaacgcgcgaggcagctgcggtaaagctcatcagcgtggtcgtgaagcgattcacagatgtctgcctgttcatccgcgtccagctcgttgagtttctccagaagcgttaatgtctggcttctgataaagcgggccatgttaagggcggttttttcctgtttggtcactgatgcctccgtgtaagggggatttctgttcatgggggtaatgataccgatgaaacgagagaggatgctcacgatacgggttactgatgatgaacatgcccggttactggaacgttgtgagggtaaacaactggcggtatggatgcggcgggaccagagaaaaatcactcagggtcaatgccagcgcttcgttaatacagatgtaggtgttccacagggtagccagcagcatcctgcgatgcagatccggaacataatggtgcagggcgctgacttccgcgtttccagactttacgaaacacggaaaccgaagaccattcatgttgttgctcaggtcgcagacgttttgcagcagcagtcgcttcacgttcgctcgcgtatcggtgattcattctgctaaccagtaaggcaaccccgccagcctagccgggtcctcaacgacaggagcacgatcatgcgcacccgtggccaggacccaacgctgcccgagatgcgccgcgtgcggctgctggagatggcggacgcgatggatatgttctgccaagggttggtttgcgcattcacagttctccgcaagaattgattggctccaattcttggagtggtgaatccgttagcgaggtgccgccggcttccattcaggtcgaggtggcccggctccatgcaccgcgacgcaacgcggggaggcagacaaggtatagggcggcgcctacaatccatgccaacccgttccatgtgctcgccgaggcggcataaatcgccgtgacgatcagcggtccagtgatcgaagttaggctggtaagagccgcgagcgatccttgaagctgtccctgatggtcgtcatctacctgcctggacagcatggcctgcaacgcgggcatcccgatgccgccggaagcgagaagaatcataatggggaaggccatccagcctcgcgtcgcgaacgccagcaagacgtagcccagcgcgtcggccgccatgccggcgataatggcctgcttctcgccgaaacgtttggtggcgggaccagtgacgaaggcttgagcgagggcgtgcaagattccgaataccgcaagcgacaggccgatcatcgtcgcgctccagcgaaagcggtcctcgccgaaaatgacccagagcgctgccggcacctgtcctacgagttgcatgataaagaagacagtcataagtgcggcgacgatagtcatgccccgcgcccaccggaaggagctgactgggttgaaggctctcaagggcatcggtcgagatcccggtgcctaatgagtgagctaacttacattaattgcgttgcgctcactgcccgctttccagtcgggaaacctgtcgtgccagctgcattaatgaatcggccaacgcgcggggagaggcggtttgcgtattgggcgccagggtggtttttcttttcaccagtgagacgggcaacagctgattgcccttcaccgcctggccctgagagagttgcagcaagcggtccacgctggtttgccccagcaggcgaaaatcctgtttgatggtggttaacggcgggatataacatgagctgtcttcggtatcgtcgtatcccactaccgagatatccgcaccaacgcgcagcccggactcggtaatggcgcgcattgcgcccagcgccatctgatcgttggcaaccagcatcgcagtgggaacgatgccctcattcagcatttgcatggtttgttgaaaaccggacatggcactccagtcgccttcccgttccgctatcggctgaatttgattgcgagtgagatatttatgccagccagccagacgcagacgcgccgagacagaacttaatgggcccgctaacagcgcgatttgctggtgacccaatgcgaccagatgctccacgcccagtcgcgtaccgtcttcatgggagaaaataatactgttgatgggtgtc

SEQ ID NO: 123 - protein, 526 aa, Serratia entomophila
MPYSSESKEKETHSKETERDNADPVFQRVSQGGVGVSPPDEGGDLSAGSNNDHLFAFIRETHLEEAQEFRLKGYNSQVPEVDEGLLTQLRDDLAAAKSRQYVQASVGGPLGSRWLLEQIGKIERLTDKFSDEVIKRWVKHELPRKNVGEAAGTELGSRRRAQSLARRLESTMQTLIRVVHTLHAMDDYSTPEKRHDMLVAELTGAFSSSDKNTVIQALGRMTAETSGHAAWASLMQARTAAWEAGKSATVDAMIATSQHEAEKANKKARELQGDSQAFFSHVAAYLQSLSSDLAKVSINMGQSTSSSTIRNEAEKASELQGDSQTFVSHVAAYLQSLPSDLAKVPINMWQNMDFVKTKLQAQTAVAGMKVHAHRLVRIAQHGHSTKTPAKDPEQVVTDSIIRSILWLWQQPAIKIQCASTALLSKVGELKKIEGILASYAVTDELGNEQERRNPPGEEDLDAQLREWVSASLKQENPENQRAVKVVTLERLLGGDIASARNLVERLGKAEEGIQNLLRRQQVAVLK

SEQ ID NO: 124 - DNA, 6334 bp, Serratia entomophila
  source 1..6334: mol_type = other DNA
  CDS 933..1490: note = Afp18 N-terminal truncation (M) 2182
tggtcagagacatcaagaaataacgccggaacattagtgcaggcagcttccacagcaatggcatcctggtcatccagcggatagttaatgatcagcccactgacgcgttgcgcgagaagattgtgcaccgccgctttacaggcttcgacgccgcttcgttctaccatcgacaccaccacgctggcacccagttgatcggcgcgagatttaatcgccgcgacaatttgcgacggcgcgtgcagggccagactggaggtggcaacgccaatcagcaacgactgtttgcccgccagttgttgtgccacgcggttgggaatgtaattcagctccgccatcgccgcttccactttttcccgcgttttcgcagaaacgtggctggcctggttcaccacgcgggaaacggtctgataagagacaccggcatactctgcgacatcgtataacgttactggtttcacattcaccaccctgaattgactctcttccgggcgctatcatgccataccgcgaaaggttttgcgccattcgatggtgtccgggatctcgacgctctcccttatgcgactcctgcattaggaagcagcccagtagtaggttgaggccgttgagcaccgccgccgcaaggaatggtgcatgcaaggagatggcgcccaacagtcccccggccacggggcctgccaccatacccacgccgaaacaagcgctcatgagcccgaagtggcgagcccgatcttccccatcggtgatgtcggcgatataggcgccagcaaccgcacctgtggcgccggtgatgccggccacgatgcgtccggcgtagaggatcgagatctcgatcccgcgaaattaatacgactcactataggggaattgtgagcggataacaattcccctctagaaataattttgtttaactttaagaaggagatatacatatgataaatagaattaagaacactctgaaacatgaaaattacacatatgatcttaaagtaaatgaaagggattatcttttattacagttggaacaaaaatatatagcttcgagtaaacctcctaaagtcggagctcaaaaatggagtgctgacataaataaagaaattaattatttatgcgatgagatcgaagaaaaaaaacgcgaggtggtttgttgggagaataagaagaatgaatcatcacgaagacttgatttgtggagtacggcgacgaaatatttatctgacccgaaaggaattaaaccaccgattgatactgatgtaatactcaataacattaatgatgttcttaatcatgctggctacgtatataactataaagtgagagaaaaggataatcttgagaaaaagttgagtagaacccccctaacaagtcagatagaagtgaaccgtttacaaaccgagatcgcaaaaagatatagactaatagattattgggggaaaaaagcagatgaaacattactaatgtttatcttgtggaggaatgtgtttggttaaggtacccttgaggtgctgtttcagggaccaggaggtagtggatctgcttggagccatccacagttcgaaaaaggtggaggttctggcggtggatcaggtggaagtgcatggtctcaccctcagtttgagaaataaggatccggctgctaacaaagcccgaaaggaagctgagttggctgctgccaccgctgagcaataactagcataaccccttggggcctctaaacgggtcttgaggggttttttgctgaaaggaggaactatatccggatatcccgcaagaggcccggcagtaccggcataaccaagcctatgcctacagcatccagggtgacggtgccgaggatgacgatgagcgcattgttagatttcatacacggtgcctgactgcgttagcaatttaactgtgataaactaccgcattaaagcttatcgatgataagctgtcaaacatgagaattcttgaagacgaaagggcctcgtgatacgcctatttttataggttaatgtcatgataataatggtttcttagacgtcaggtggcacttttcggggaaatgtgcgcggaacccctatttgtttatttttctaaatacattcaaatatgtatccgctcatgagacaataaccctgataaatgcttcaataatattgaaaaaggaagagtatgagtattcaacatttccgtgtcgcccttattcccttttttgcggcattttgccttcctgtttttgctcacccagaaacgctggtgaaagtaaaagatgctgaagatcagttgggtgcacgagtgggttacatcgaactggatctcaacagcggtaagatccttgagagttttcgccccgaagaacgttttccaatgatgagcacttttaaagttctgctatgtggcgcggtattatcccgtgttgacgccgggcaagagcaactcggtcgccgcatacactattctcagaatgacttggttgagtactcaccagtcacagaaaagcatcttacggatggcatgacagtaagagaattatgcagtgctgccataaccatgagtgataacactgcggccaacttacttctgacaacgatcggaggaccgaaggagctaaccgcttttttgcacaacatgggggatcatgtaactcgccttgatcgttgggaaccggagctgaatgaagccataccaaacgacgagcgtgacaccacgatgcctgcagcaatggcaacaacgttgcgcaaactattaactggcgaactacttactctagcttcccggcaacaattaatagactggatggaggcggataaagttgcaggaccacttctgcgctcggcccttccggctggctggtttattgctgataaatctggagccggtgagcgtgggtctcgcggtatcattgcagcactggggccagatggtaagccctcccgtatcgtagttatctacacgacggggagtcaggcaactatggatgaacgaaatagacagatcgctgagataggtgcctcactgattaagcattggtaactgtcagaccaagtttactcatatatactttagattgatttaaaacttcatttttaatttaaaaggatctaggtgaagatcctttttgataatctcatgaccaaaatcccttaacgtgagttttcgttccactgagcgtcagaccccgtagaaaagatcaaaggatcttcttgagatcctttttttctgcgcgtaatctgctgcttgcaaacaaaaaaaccaccgctaccagcggtggtttgtttgccggatcaagagctaccaactctttttccgaaggtaactggcttcagcagagcgcagataccaaatactgtccttctagtgtagccgtagttaggccaccacttcaagaactctgtagcaccgcctacatacctcgctctgctaatcctgttaccagtggctgctgccagtggcgataagtcgtgtcttaccgggttggactcaagacgatagttaccggataaggcgcagcggtcgggctgaacggggggttcgtgcacacagcccagcttggagcgaacgacctacaccgaactgagatacctacagcgtgagctatgagaaagcgccacgcttcccgaagggagaaaggcggacaggtatccggtaagcggcagggtcggaacaggagagcgcacgagggagcttccagggggaaacgcctggtatctttatagtcctgtcgggtttcgccacctctgacttgagcgtcgatttttgtgatgctcgtcaggggggcggagcctatggaaaaacgccagcaacgcggcctttttacggttcctggccttttgctggccttttgctcacatgttctttcctgcgttatcccctgattctgtggataaccgtattaccgcctttgagtgagctgataccgctcgccgcagccgaacgaccgagcgcagcgagtcagtgagcgaggaagcggaagagcgcctgatgcggtattttctccttacgcatctgtgcggtatttcacaccgcatatatggtgcactctcagtacaatctgctctgatgccgcatagttaagccagtatacactccgctatcgctacgtgactgggtcatggctgcgccccgacacccgccaacacccgctgacgcgccctgacgggcttgtctgctcccggcatccgcttacagacaagctgtgaccgtctccgggagctgcatgtgtcagaggttttcaccgtcatcaccgaaacgcgcgaggcagctgcggtaaagctcatcagcgtggtcgtgaagcgattcacagatgtctgcctgttcatccgcgtccagctcgttgagtttctccagaagcgttaatgtctggcttctgataaagcgggccatgttaagggcggttttttcctgtttggtcactgatgcctccgtgtaagggggatttctgttcatgggggtaatgataccgatgaaacgagagaggatgctcacgatacgggttactgatgatgaacatgcccggttactggaacgttgtgagggtaaacaactggcggtatggatgcggcgggaccagagaaaaatcactcagggtcaatgccagcgcttcgttaatacagatgtaggtgttccacagggtagccagcagcatcctgcgatgcagatccggaacataatggtgcagggcgctgacttccgcgtttccagactttacgaaacacggaaaccgaagaccattcatgttgttgctcaggtcgcagacgttttgcagcagcagtcgcttcacgttcgctcgcgtatcggtgattcattctgctaaccagtaaggcaaccccgccagcctagccgggtcctcaacgacaggagcacgatcatgcgcacccgtggccaggacccaacgctgcccgagatgcgccgcgtgcggctgctggagatggcggacgcgatggatatgttctgccaagggttggtttgcgcattcacagttctccgcaagaattgattggctccaattcttggagtggtgaatccgttagcgaggtgccgccggcttccattcaggtcgaggtggcccggctccatgcaccgcgacgcaacgcggggaggcagacaaggtatagggcggcgcctacaatccatgccaacccgttccatgtgctcgccgaggcggcataaatcgccgtgacgatcagcggtccagtgatcgaagttaggctggtaagagccgcgagcgatccttgaagctgtccctgatggtcgtcatctacctgcctggacagcatggcctgcaacgcgggcatcccgatgccgccggaagcgagaagaatcataatggggaaggccatccagcctcgcgtcgcgaacgccagcaagacgtagcccagcgcgtcggccgccatgccggcgataatggcctgcttctcgccgaaacgtttggtggcgggaccagtgacgaaggcttgagcgagggcgtgcaagattccgaataccgcaagcgacaggccgatcatcgtcgcgctccagcgaaagcggtcctcgccgaaaatgacccagagcgctgccggcacctgtcctacgagttgcatgataaagaagacagtcataagtgcggcgacgatagtcatgccccgcgcccaccggaaggagctgactgggttgaaggctctcaagggcatcggtcgagatcccggtgcctaatgagtgagctaacttacattaattgcgttgcgctcactgcccgctttccagtcgggaaacctgtcgtgccagctgcattaatgaatcggccaacgcgcggggagaggcggtttgcgtattgggcgccagggtggtttttcttttcaccagtgagacgggcaacagctgattgcccttcaccgcctggccctgagagagttgcagcaagcggtccacgctggtttgccccagcaggcgaaaatcctgtttgatggtggttaacggcgggatataacatgagctgtcttcggtatcgtcgtatcccactaccgagatatccgcaccaacgcgcagcccggactcggtaatggcgcgcattgcgcccagcgccatctgatcgttggcaaccagcatcgcagtgggaacgatgccctcattcagcatttgcatggtttgttgaaaaccggacatggcactccagtcgccttcccgttccgctatcggctgaatttgattgcgagtgagatatttatgccagccagccagacgcagacgcgccgagacagaacttaatgggcccgctaacagcgcgatttgctggtgacccaatgcgaccagatgctccacgcccagtcgcgtaccgtcttcatgggagaaaataatactgttgatgggtgtc

SEQ ID NO: 125 - protein, 185 aa, Serratia entomophila
MINRIKNTLKHENYTYDLKVNERDYLLLQLEQKYIASSKPPKVGAQKWSADINKEINYLCDEIEEKKREVVCWENKKNESSRRLDLWSTATKYLSDPKGIKPPIDTDVILNNINDVLNHAGYVYNYKVREKDNLEKKLSRTPLTSQIEVNRLQTEIAKRYRLIDYWGKKADETLLMFILWRNVFG

SEQ ID NO: 126 - DNA, 7288 bp, Serratia entomophila
  source 1..7288: mol_type = other DNA
  CDS 933..2444: note = Afp18 N-terminal truncation (M) 1864
tggtcagagacatcaagaaataacgccggaacattagtgcaggcagcttccacagcaatggcatcctggtcatccagcggatagttaatgatcagcccactgacgcgttgcgcgagaagattgtgcaccgccgctttacaggcttcgacgccgcttcgttctaccatcgacaccaccacgctggcacccagttgatcggcgcgagatttaatcgccgcgacaatttgcgacggcgcgtgcagggccagactggaggtggcaacgccaatcagcaacgactgtttgcccgccagttgttgtgccacgcggttgggaatgtaattcagctccgccatcgccgcttccactttttcccgcgttttcgcagaaacgtggctggcctggttcaccacgcgggaaacggtctgataagagacaccggcatactctgcgacatcgtataacgttactggtttcacattcaccaccctgaattgactctcttccgggcgctatcatgccataccgcgaaaggttttgcgccattcgatggtgtccgggatctcgacgctctcccttatgcgactcctgcattaggaagcagcccagtagtaggttgaggccgttgagcaccgccgccgcaaggaatggtgcatgcaaggagatggcgcccaacagtcccccggccacggggcctgccaccatacccacgccgaaacaagcgctcatgagcccgaagtggcgagcccgatcttccccatcggtgatgtcggcgatataggcgccagcaaccgcacctgtggcgccggtgatgccggccacgatgcgtccggcgtagaggatcgagatctcgatcccgcgaaattaatacgactcactataggggaattgtgagcggataacaattcccctctagaaataattttgtttaactttaagaaggagatatacatatgccctatgacagtaagaaaagaatttttctggctatgttgccagaaaatcagcgccatggtggattagttgatacggtgacccatgaagcttcacataattcttcttacacattagatcatacttatatagggaacgcgcggagtaacaccggttcatttccttcctcatttgaacctccaactcgagattcgaggtatttttatgaaaatgaacgggtaggtaaactgagtgcaaagtatgctttagacttacccgaaaatgctaatatcacccaaaatcaactagcgcaggcagatattctgttaagaaacagcaggttgactaaagcagatacgcttctgaatgctgcagaatataatgcttatatgattgacgttctaagccgggtaaaaataaacggctcacatattgagtttgaagaaaactcatccagaagcaaacgctctgtttccggaggaaatcataaacttgatgatataattatactggcttcgatgaacgctacgcttcctaggagggaggggggggaatttgagtcatctaccttcaagaaaacattaacggaatttataaacaagggtacgaccagcagtcaggttgatcctgtttatgcatcctatctaccagcgtttaataccattgtagatagcgagggtattacattgcaacaggtgaaagacttaaaatcagctctgcccgcaaccggcaacgatctgagggctcaagccagatataactatgcggtgctacaatatttatctgggtcggcaggaattaagctaccaattgatactgatgtaatacgaaatagcattaatgatgatctgaatattgcaagttgcgtagataactgtaaaaaggcagcctcacaaaggcttgagttgttgaaggcggtgccagaatatttatctgggccggaagcaattcacgcacagattgatactaatttaatgataaatagaattaagaacactctgaaacatgaaaattacacatatgatcttaaagtaaatgaaagggattatcttttattacagttggaacaaaaatatatagcttcgagtaaacctcctaaagtcggagctcaaaaatggagtgctgacataaataaagaaattaattatttatgcgatgagatcgaagaaaaaaaacgcgaggtggtttgttgggagaataagaagaatgaatcatcacgaagacttgatttgtggagtacggcgacgaaatatttatctgacccgaaaggaattaaaccaccgattgatactgatgtaatactcaataacattaatgatgttcttaatcatgctggctacgtatataactataaagtgagagaaaaggataatcttgagaaaaagttgagtagaacccccctaacaagtcagatagaagtgaaccgtttacaaaccgagatcgcaaaaagatatagactaatagattattgggggaaaaaagcagatgaaacattactaatgtttatcttgtggaggaatgtgtttggttaaggtacccttgaggtgctgtttcagggaccaggaggtagtggatctgcttggagccatccacagttcgaaaaaggtggaggttctggcggtggatcaggtggaagtgcatggtctcaccctcagtttgagaaataaggatccggctgctaacaaagcccgaaaggaagctgagttggctgctgccaccgctgagcaataactagcataaccccttggggcctctaaacgggtcttgaggggttttttgctgaaaggaggaactatatccggatatcccgcaagaggcccggcagtaccggcataaccaagcctatgcctacagcatccagggtgacggtgccgaggatgacgatgagcgcattgttagatttcatacacggtgcctgactgcgttagcaatttaactgtgataaactaccgcattaaagcttatcgatgataagctgtcaaacatgagaattcttgaagacgaaagggcctcgtgatacgcctatttttataggttaatgtcatgataataatggtttcttagacgtcaggtggcacttttcggggaaatgtgcgcggaacccctatttgtttatttttctaaatacattcaaatatgtatccgctcatgagacaataaccctgataaatgcttcaataatattgaaaaaggaagagtatgagtattcaacatttccgtgtcgcccttattcccttttttgcggcattttgccttcctgtttttgctcacccagaaacgctggtgaaagtaaaagatgctgaagatcagttgggtgcacgagtgggttacatcgaactggatctcaacagcggtaagatccttgagagttttcgccccgaagaacgttttccaatgatgagcacttttaaagttctgctatgtggcgcggtattatcccgtgttgacgccgggcaagagcaactcggtcgccgcatacactattctcagaatgacttggttgagtactcaccagtcacagaaaagcatcttacggatggcatgacagtaagagaattatgcagtgctgccataaccatgagtgataacactgcggccaacttacttctgacaacgatcggaggaccgaaggagctaaccgcttttttgcacaacatgggggatcatgtaactcgccttgatcgttgggaaccggagctgaatgaagccataccaaacgacgagcgtgacaccacgatgcctgcagcaatggcaacaacgttgcgcaaactattaactggcgaactacttactctagcttcccggcaacaattaatagactggatggaggcggataaagttgcaggaccacttctgcgctcggcccttccggctggctggtttattgctgataaatctggagccggtgagcgtgggtctcgcggtatcattgcagcactggggccagatggtaagccctcccgtatcgtagttatctacacgacggggagtcaggcaactatggatgaacgaaatagacagatcgctgagataggtgcctcactgattaagcattggtaactgtcagaccaagtttactcatatatactttagattgatttaaaacttcatttttaatttaaaaggatctaggtgaagatcctttttgataatctcatgaccaaaatcccttaacgtgagttttcgttccactgagcgtcagaccccgtagaaaagatcaaaggatcttcttgagatcctttttttctgcgcgtaatctgctgcttgcaaacaaaaaaaccaccgctaccagcggtggtttgtttgccggatcaagagctaccaactctttttccgaaggtaactggcttcagcagagcgcagataccaaatactgtccttctagtgtagccgtagttaggccaccacttcaagaactctgtagcaccgcctacatacctcgctctgctaatcctgttaccagtggctgctgccagtggcgataagtcgtgtcttaccgggttggactcaagacgatagttaccggataaggcgcagcggtcgggctgaacggggggttcgtgcacacagcccagcttggagcgaacgacctacaccgaactgagatacctacagcgtgagctatgagaaagcgccacgcttcccgaagggagaaaggcggacaggtatccggtaagcggcagggtcggaacaggagagcgcacgagggagcttccagggggaaacgcctggtatctttatagtcctgtcgggtttcgccacctctgacttgagcgtcgatttttgtgatgctcgtcaggggggcggagcctatggaaaaacgccagcaacgcggcctttttacggttcctggccttttgctggccttttgctcacatgttctttcctgcgttatcccctgattctgtggataaccgtattaccgcctttgagtgagctgataccgctcgccgcagccgaacgaccgagcgcagcgagtcagtgagcgaggaagcggaagagcgcctgatgcggtattttctccttacgcatctgtgcggtatttcacaccgcatatatggtgcactctcagtacaatctgctctgatgccgcatagttaagccagtatacactccgctatcgctacgtgactgggtcatggctgcgccccgacacccgccaacacccgctgacgcgccctgacgggcttgtctgctcccggcatccgcttacagacaagctgtgaccgtctccgggagctgcatgtgtcagaggttttcaccgtcatcaccgaaacgcgcgaggcagctgcggtaaagctcatcagcgtggtcgtgaagcgattcacagatgtctgcctgttcatccgcgtccagctcgttgagtttctccagaagcgttaatgtctggcttctgataaagcgggccatgttaagggcggttttttcctgtttggtcactgatgcctccgtgtaagggggatttctgttcatgggggtaatgataccgatgaaacgagagaggatgctcacgatacgggttactgatgatgaacatgcccggttactggaacgttgtgagggtaaacaactggcggtatggatgcggcgggaccagagaaaaatcactcagggtcaatgccagcgcttcgttaatacagatgtaggtgttccacagggtagccagcagcatcctgcgatgcagatccggaacataatggtgcagggcgctgacttccgcgtttccagactttacgaaacacggaaaccgaagaccattcatgttgttgctcaggtcgcagacgttttgcagcagcagtcgcttcacgttcgctcgcgtatcggtgattcattctgctaaccagtaaggcaaccccgccagcctagccgggtcctcaacgacaggagcacgatcatgcgcacccgtggccaggacccaacgctgcccgagatgcgccgcgtgcggctgctggagatggcggacgcgatggatatgttctgccaagggttggtttgcgcattcacagttctccgcaagaattgattggctccaattcttggagtggtgaatccgttagcgaggtgccgccggcttccattcaggtcgaggtggcccggctccatgcaccgcgacgcaacgcggggaggcagacaaggtatagggcggcgcctacaatccatgccaacccgttccatgtgctcgccgaggcggcataaatcgccgtgacgatcagcggtccagtgatcgaagttaggctggtaagagccgcgagcgatccttgaagctgtccctgatggtcgtcatctacctgcctggacagcatggcctgcaacgcgggcatcccgatgccgccggaagcgagaagaatcataatggggaaggccatccagcctcgcgtcgcgaacgccagcaagacgtagcccagcgcgtcggccgccatgccggcgataatggcctgcttctcgccgaaacgtttggtggcgggaccagtgacgaaggcttgagcgagggcgtgcaagattccgaataccgcaagcgacaggccgatcatcgtcgcgctccagcgaaagcggtcctcgccgaaaatgacccagagcgctgccggcacctgtcctacgagttgcatgataaagaagacagtcataagtgcggcgacgatagtcatgccccgcgcccaccggaaggagctgactgggttgaaggctctcaagggcatcggtcgagatcccggtgcctaatgagtgagctaacttacattaattgcgttgcgctcactgcccgctttccagtcgggaaacctgtcgtgccagctgcattaatgaatcggccaacgcgcggggagaggcggtttgcgtattgggcgccagggtggtttttcttttcaccagtgagacgggcaacagctgattgcccttcaccgcctggccctgagagagttgcagcaagcggtccacgctggtttgccccagcaggcgaaaatcctgtttgatggtggttaacggcgggatataacatgagctgtcttcggtatcgtcgtatcccactaccgagatatccgcaccaacgcgcagcccggactcggtaatggcgcgcattgcgcccagcgccatctgatcgttggcaaccagcatcgcagtgggaacgatgccctcattcagcatttgcatggtttgttgaaaaccggacatggcactccagtcgccttcccgttccgctatcggctgaatttgattgcgagtgagatatttatgccagccagccagacgcagacgcgccgagacagaacttaatgggcccgctaacagcgcgatttgctggtgacccaatgcgaccagatgctccacgcccagtcgcgtaccgtcttcatgggagaaaataatactgttgatgggtgtc

SEQ ID NO: 127 - protein, 503 aa, Serratia entomophila
MPYDSKKRIFLAMLPENQRHGGLVDTVTHEASHNSSYTLDHTYIGNARSNTGSFPSSFEPPTRDSRYFYENERVGKLSAKYALDLPENANITQNQLAQADILLRNSRLTKADTLLNAAEYNAYMIDVLSRVKINGSHIEFEENSSRSKRSVSGGNHKLDDIIILASMNATLPRREGGEFESSTFKKTLTEFINKGTTSSQVDPVYASYLPAFNTIVDSEGITLQQVKDLKSALPATGNDLRAQARYNYAVLQYLSGSAGIKLPIDTDVIRNSINDDLNIASCVDNCKKAASQRLELLKAVPEYLSGPEAIHAQIDTNLMINRIKNTLKHENYTYDLKVNERDYLLLQLEQKYIASSKPPKVGAQKWSADINKEINYLCDEIEEKKREVVCWENKKNESSRRLDLWSTATKYLSDPKGIKPPIDTDVILNNINDVLNHAGYVYNYKVREKDNLEKKLSRTPLTSQIEVNRLQTEIAKRYRLIDYWGKKADETLLMFILWRNVFG

SEQ ID NO: 128 - DNA, 7795 bp, Serratia entomophila
  source 1..7795: mol_type = other DNA
  CDS 933..2951: note = Afp18 N-terminal truncation (M) 1695
tggtcagagacatcaagaaataacgccggaacattagtgcaggcagcttccacagcaatggcatcctggtcatccagcggatagttaatgatcagcccactgacgcgttgcgcgagaagattgtgcaccgccgctttacaggcttcgacgccgcttcgttctaccatcgacaccaccacgctggcacccagttgatcggcgcgagatttaatcgccgcgacaatttgcgacggcgcgtgcagggccagactggaggtggcaacgccaatcagcaacgactgtttgcccgccagttgttgtgccacgcggttgggaatgtaattcagctccgccatcgccgcttccactttttcccgcgttttcgcagaaacgtggctggcctggttcaccacgcgggaaacggtctgataagagacaccggcatactctgcgacatcgtataacgttactggtttcacattcaccaccctgaattgactctcttccgggcgctatcatgccataccgcgaaaggttttgcgccattcgatggtgtccgggatctcgacgctctcccttatgcgactcctgcattaggaagcagcccagtagtaggttgaggccgttgagcaccgccgccgcaaggaatggtgcatgcaaggagatggcgcccaacagtcccccggccacggggcctgccaccatacccacgccgaaacaagcgctcatgagcccgaagtggcgagcccgatcttccccatcggtgatgtcggcgatataggcgccagcaaccgcacctgtggcgccggtgatgccggccacgatgcgtccggcgtagaggatcgagatctcgatcccgcgaaattaatacgactcactataggggaattgtgagcggataacaattcccctctagaaataattttgtttaactttaagaaggagatatacatatgataaatcatctaaaaactatagtaagaacgacattcacacctgttaaaccgatagaagaaatatccagtgaaaaaactgatgcggccattaaaggaataatgaccaatggggatgcggaaataatttccgaaaacattatcgagagcaaaaatagtttagaccatgatacaagttatttttctcatgaagttatttcagctgttgatcgtgcatatgaaaaagtaaactccgtgaaatctctttttgaacgtgcagaatctcagcctgagattaaatctcaattaaaatcattaattaatgaagccactggattgaatgatgaggttatcattgatattgataaagtagatgtttctagcatatcagacatggcctataacaggtttaaagataatatcaatactctacatgactatctctctaagcaaaaatcagggggttatacatcctttgttttatttaaatatcgccagtttaatccatccaagcctgatgcctttgccatgccctatgacagtaagaaaagaatttttctggctatgttgccagaaaatcagcgccatggtggattagttgatacggtgacccatgaagcttcacataattcttcttacacattagatcatacttatatagggaacgcgcggagtaacaccggttcatttccttcctcatttgaacctccaactcgagattcgaggtatttttatgaaaatgaacgggtaggtaaactgagtgcaaagtatgctttagacttacccgaaaatgctaatatcacccaaaatcaactagcgcaggcagatattctgttaagaaacagcaggttgactaaagcagatacgcttctgaatgctgcagaatataatgcttatatgattgacgttctaagccgggtaaaaataaacggctcacatattgagtttgaagaaaactcatccagaagcaaacgctctgtttccggaggaaatcataaacttgatgatataattatactggcttcgatgaacgctacgcttcctaggagggaggggggggaatttgagtcatctaccttcaagaaaacattaacggaatttataaacaagggtacgaccagcagtcaggttgatcctgtttatgcatcctatctaccagcgtttaataccattgtagatagcgagggtattacattgcaacaggtgaaagacttaaaatcagctctgcccgcaaccggcaacgatctgagggctcaagccagatataactatgcggtgctacaatatttatctgggtcggcaggaattaagctaccaattgatactgatgtaatacgaaatagcattaatgatgatctgaatattgcaagttgcgtagataactgtaaaaaggcagcctcacaaaggcttgagttgttgaaggcggtgccagaatatttatctgggccggaagcaattcacgcacagattgatactaatttaatgataaatagaattaagaacactctgaaacatgaaaattacacatatgatcttaaagtaaatgaaagggattatcttttattacagttggaacaaaaatatatagcttcgagtaaacctcctaaagtcggagctcaaaaatggagtgctgacataaataaagaaattaattatttatgcgatgagatcgaagaaaaaaaacgcgaggtggtttgttgggagaataagaagaatgaatcatcacgaagacttgatttgtggagtacggcgacgaaatatttatctgacccgaaaggaattaaaccaccgattgatactgatgtaatactcaataacattaatgatgttcttaatcatgctggctacgtatataactataaagtgagagaaaaggataatcttgagaaaaagttgagtagaacccccctaacaagtcagatagaagtgaaccgtttacaaaccgagatcgcaaaaagatatagactaatagattattgggggaaaaaagcagatgaaacattactaatgtttatcttgtggaggaatgtgtttggttaaggtacccttgaggtgctgtttcagggaccaggaggtagtggatctgcttggagccatccacagttcgaaaaaggtggaggttctggcggtggatcaggtggaagtgcatggtctcaccctcagtttgagaaataaggatccggctgctaacaaagcccgaaaggaagctgagttggctgctgccaccgctgagcaataactagcataaccccttggggcctctaaacgggtcttgaggggttttttgctgaaaggaggaactatatccggatatcccgcaagaggcccggcagtaccggcataaccaagcctatgcctacagcatccagggtgacggtgccgaggatgacgatgagcgcattgttagatttcatacacggtgcctgactgcgttagcaatttaactgtgataaactaccgcattaaagcttatcgatgataagctgtcaaacatgagaattcttgaagacgaaagggcctcgtgatacgcctatttttataggttaatgtcatgataataatggtttcttagacgtcaggtggcacttttcggggaaatgtgcgcggaacccctatttgtttatttttctaaatacattcaaatatgtatccgctcatgagacaataaccctgataaatgcttcaataatattgaaaaaggaagagtatgagtattcaacatttccgtgtcgcccttattcccttttttgcggcattttgccttcctgtttttgctcacccagaaacgctggtgaaagtaaaagatgctgaagatcagttgggtgcacgagtgggttacatcgaactggatctcaacagcggtaagatccttgagagttttcgccccgaagaacgttttccaatgatgagcacttttaaagttctgctatgtggcgcggtattatcccgtgttgacgccgggcaagagcaactcggtcgccgcatacactattctcagaatgacttggttgagtactcaccagtcacagaaaagcatcttacggatggcatgacagtaagagaattatgcagtgctgccataaccatgagtgataacactgcggccaacttacttctgacaacgatcggaggaccgaaggagctaaccgcttttttgcacaacatgggggatcatgtaactcgccttgatcgttgggaaccggagctgaatgaagccataccaaacgacgagcgtgacaccacgatgcctgcagcaatggcaacaacgttgcgcaaactattaactggcgaactacttactctagcttcccggcaacaattaatagactggatggaggcggataaagttgcaggaccacttctgcgctcggcccttccggctggctggtttattgctgataaatctggagccggtgagcgtgggtctcgcggtatcattgcagcactggggccagatggtaagccctcccgtatcgtagttatctacacgacggggagtcaggcaactatggatgaacgaaatagacagatcgctgagataggtgcctcactgattaagcattggtaactgtcagaccaagtttactcatatatactttagattgatttaaaacttcatttttaatttaaaaggatctaggtgaagatcctttttgataatctcatgaccaaaatcccttaacgtgagttttcgttccactgagcgtcagaccccgtagaaaagatcaaaggatcttcttgagatcctttttttctgcgcgtaatctgctgcttgcaaacaaaaaaaccaccgctaccagcggtggtttgtttgccggatcaagagctaccaactctttttccgaaggtaactggcttcagcagagcgcagataccaaatactgtccttctagtgtagccgtagttaggccaccacttcaagaactctgtagcaccgcctacatacctcgctctgctaatcctgttaccagtggctgctgccagtggcgataagtcgtgtcttaccgggttggactcaagacgatagttaccggataaggcgcagcggtcgggctgaacggggggttcgtgcacacagcccagcttggagcgaacgacctacaccgaactgagatacctacagcgtgagctatgagaaagcgccacgcttcccgaagggagaaaggcggacaggtatccggtaagcggcagggtcggaacaggagagcgcacgagggagcttccagggggaaacgcctggtatctttatagtcctgtcgggtttcgccacctctgacttgagcgtcgatttttgtgatgctcgtcaggggggcggagcctatggaaaaacgccagcaacgcggcctttttacggttcctggccttttgctggccttttgctcacatgttctttcctgcgttatcccctgattctgtggataaccgtattaccgcctttgagtgagctgataccgctcgccgcagccgaacgaccgagcgcagcgagtcagtgagcgaggaagcggaagagcgcctgatgcggtattttctccttacgcatctgtgcggtatttcacaccgcatatatggtgcactctcagtacaatctgctctgatgccgcatagttaagccagtatacactccgctatcgctacgtgactgggtcatggctgcgccccgacacccgccaacacccgctgacgcgccctgacgggcttgtctgctcccggcatccgcttacagacaagctgtgaccgtctccgggagctgcatgtgtcagaggttttcaccgtcatcaccgaaacgcgcgaggcagctgcggtaaagctcatcagcgtggtcgtgaagcgattcacagatgtctgcctgttcatccgcgtccagctcgttgagtttctccagaagcgttaatgtctggcttctgataaagcgggccatgttaagggcggttttttcctgtttggtcactgatgcctccgtgtaagggggatttctgttcatgggggtaatgataccgatgaaacgagagaggatgctcacgatacgggttactgatgatgaacatgcccggttactggaacgttgtgagggtaaacaactggcggtatggatgcggcgggaccagagaaaaatcactcagggtcaatgccagcgcttcgttaatacagatgtaggtgttccacagggtagccagcagcatcctgcgatgcagatccggaacataatggtgcagggcgctgacttccgcgtttccagactttacgaaacacggaaaccgaagaccattcatgttgttgctcaggtcgcagacgttttgcagcagcagtcgcttcacgttcgctcgcgtatcggtgattcattctgctaaccagtaaggcaaccccgccagcctagccgggtcctcaacgacaggagcacgatcatgcgcacccgtggccaggacccaacgctgcccgagatgcgccgcgtgcggctgctggagatggcggacgcgatggatatgttctgccaagggttggtttgcgcattcacagttctccgcaagaattgattggctccaattcttggagtggtgaatccgttagcgaggtgccgccggcttccattcaggtcgaggtggcccggctccatgcaccgcgacgcaacgcggggaggcagacaaggtatagggcggcgcctacaatccatgccaacccgttccatgtgctcgccgaggcggcataaatcgccgtgacgatcagcggtccagtgatcgaagttaggctggtaagagccgcgagcgatccttgaagctgtccctgatggtcgtcatctacctgcctggacagcatggcctgcaacgcgggcatcccgatgccgccggaagcgagaagaatcataatggggaaggccatccagcctcgcgtcgcgaacgccagcaagacgtagcccagcgcgtcggccgccatgccggcgataatggcctgcttctcgccgaaacgtttggtggcgggaccagtgacgaaggcttgagcgagggcgtgcaagattccgaataccgcaagcgacaggccgatcatcgtcgcgctccagcgaaagcggtcctcgccgaaaatgacccagagcgctgccggcacctgtcctacgagttgcatgataaagaagacagtcataagtgcggcgacgatagtcatgccccgcgcccaccggaaggagctgactgggttgaaggctctcaagggcatcggtcgagatcccggtgcctaatgagtgagctaacttacattaattgcgttgcgctcactgcccgctttccagtcgggaaacctgtcgtgccagctgcattaatgaatcggccaacgcgcggggagaggcggtttgcgtattgggcgccagggtggtttttcttttcaccagtgagacgggcaacagctgattgcccttcaccgcctggccctgagagagttgcagcaagcggtccacgctggtttgccccagcaggcgaaaatcctgtttgatggtggttaacggcgggatataacatgagctgtcttcggtatcgtcgtatcccactaccgagatatccgcaccaacgcgcagcccggactcggtaatggcgcgcattgcgcccagcgccatctgatcgttggcaaccagcatcgcagtgggaacgatgccctcattcagcatttgcatggtttgttgaaaaccggacatggcactccagtcgccttcccgttccgctatcggctgaatttgattgcgagtgagatatttatgccagccagccagacgcagacgcgccgagacagaacttaatgggcccgctaacagcgcgatttgctggtgacccaatgcgaccagatgctccacgcccagtcgcgtaccgtcttcatgggagaaaataatactgttgatgggtgtc

SEQ ID NO: 129 - protein, 672 aa, Serratia entomophila
MINHLKTIVRTTFTPVKPIEEISSEKTDAAIKGIMTNGDAEIISENIIESKNSLDHDTSYFSHEVISAVDRAYEKVNSVKSLFERAESQPEIKSQLKSLINEATGLNDEVIIDIDKVDVSSISDMAYNRFKDNINTLHDYLSKQKSGGYTSFVLFKYRQFNPSKPDAFAMPYDSKKRIFLAMLPENQRHGGLVDTVTHEASHNSSYTLDHTYIGNARSNTGSFPSSFEPPTRDSRYFYENERVGKLSAKYALDLPENANITQNQLAQADILLRNSRLTKADTLLNAAEYNAYMIDVLSRVKINGSHIEFEENSSRSKRSVSGGNHKLDDIIILASMNATLPRREGGEFESSTFKKTLTEFINKGTTSSQVDPVYASYLPAFNTIVDSEGITLQQVKDLKSALPATGNDLRAQARYNYAVLQYLSGSAGIKLPIDTDVIRNSINDDLNIASCVDNCKKAASQRLELLKAVPEYLSGPEAIHAQIDTNLMINRIKNTLKHENYTYDLKVNERDYLLLQLEQKYIASSKPPKVGAQKWSADINKEINYLCDEIEEKKREVVCWENKKNESSRRLDLWSTATKYLSDPKGIKPPIDTDVILNNINDVLNHAGYVYNYKVREKDNLEKKLSRTPLTSQIEVNRLQTEIAKRYRLIDYWGKKADETLLMFILWRNVFG

SEQ ID NO: 130 - DNA, 8566 bp, Serratia entomophila
  source 1..8566: mol_type = other DNA
  CDS 933..3722: note = Afp18 N-terminal truncation (M) 1438
tggtcagagacatcaagaaataacgccggaacattagtgcaggcagcttccacagcaatggcatcctggtcatccagcggatagttaatgatcagcccactgacgcgttgcgcgagaagattgtgcaccgccgctttacaggcttcgacgccgcttcgttctaccatcgacaccaccacgctggcacccagttgatcggcgcgagatttaatcgccgcgacaatttgcgacggcgcgtgcagggccagactggaggtggcaacgccaatcagcaacgactgtttgcccgccagttgttgtgccacgcggttgggaatgtaattcagctccgccatcgccgcttccactttttcccgcgttttcgcagaaacgtggctggcctggttcaccacgcgggaaacggtctgataagagacaccggcatactctgcgacatcgtataacgttactggtttcacattcaccaccctgaattgactctcttccgggcgctatcatgccataccgcgaaaggttttgcgccattcgatggtgtccgggatctcgacgctctcccttatgcgactcctgcattaggaagcagcccagtagtaggttgaggccgttgagcaccgccgccgcaaggaatggtgcatgcaaggagatggcgcccaacagtcccccggccacggggcctgccaccatacccacgccgaaacaagcgctcatgagcccgaagtggcgagcccgatcttccccatcggtgatgtcggcgatataggcgccagcaaccgcacctgtggcgccggtgatgccggccacgatgcgtccggcgtagaggatcgagatctcgatcccgcgaaattaatacgactcactataggggaattgtgagcggataacaattcccctctagaaataattttgtttaactttaagaaggagatatacatatgcttaatagattttccagacttgtgttagctagaagttttgcagagaaaagaatacagtcttttgaacacagttcttcgaaatttaaaagcagtgacgagtttaaggtagataaaagcatacctttagatgcacaaaatgcttcacttaacgacatggcgagtaagacagataacttaattaatcagctagaacaatttacaggagataagaaagaatccatttccgccaatctgaaaaacatccagttaatgattggtgatataatggaaaatagaaacaataggaatgataatttaaatttccatacttatgtcttggttgggaaaaatacaacatatgacgaaataagtaactattatggttttgctgagtttaaattttcaataaataatggcaatcttactcttaacaaccttataggccacccttatgtcgtcattaataaataccctgaatttagagattatttgataagaaatggagtcatcacccaacccgagcttgaaccatataacataaagaatgtggctcggtatcttggctctaaagcggtgagcagtgagattggttattatgaatccattccagctactaaagtgaagattctctcgtttactggagccaatccgattacgcaaaaattaggtaatacacttcagagtatctctgatcttttttcaaaaaaacgattttcggacgaaccgaatgacgccatcactcaggatgaactatttacccgtcagactgatttatatacttatgatgagatgataaatcatctaaaaactatagtaagaacgacattcacacctgttaaaccgatagaagaaatatccagtgaaaaaactgatgcggccattaaaggaataatgaccaatggggatgcggaaataatttccgaaaacattatcgagagcaaaaatagtttagaccatgatacaagttatttttctcatgaagttatttcagctgttgatcgtgcatatgaaaaagtaaactccgtgaaatctctttttgaacgtgcagaatctcagcctgagattaaatctcaattaaaatcattaattaatgaagccactggattgaatgatgaggttatcattgatattgataaagtagatgtttctagcatatcagacatggcctataacaggtttaaagataatatcaatactctacatgactatctctctaagcaaaaatcagggggttatacatcctttgttttatttaaatatcgccagtttaatccatccaagcctgatgcctttgccatgccctatgacagtaagaaaagaatttttctggctatgttgccagaaaatcagcgccatggtggattagttgatacggtgacccatgaagcttcacataattcttcttacacattagatcatacttatatagggaacgcgcggagtaacaccggttcatttccttcctcatttgaacctccaactcgagattcgaggtatttttatgaaaatgaacgggtaggtaaactgagtgcaaagtatgctttagacttacccgaaaatgctaatatcacccaaaatcaactagcgcaggcagatattctgttaagaaacagcaggttgactaaagcagatacgcttctgaatgctgcagaatataatgcttatatgattgacgttctaagccgggtaaaaataaacggctcacatattgagtttgaagaaaactcatccagaagcaaacgctctgtttccggaggaaatcataaacttgatgatataattatactggcttcgatgaacgctacgcttcctaggagggaggggggggaatttgagtcatctaccttcaagaaaacattaacggaatttataaacaagggtacgaccagcagtcaggttgatcctgtttatgcatcctatctaccagcgtttaataccattgtagatagcgagggtattacattgcaacaggtgaaagacttaaaatcagctctgcccgcaaccggcaacgatctgagggctcaagccagatataactatgcggtgctacaatatttatctgggtcggcaggaattaagctaccaattgatactgatgtaatacgaaatagcattaatgatgatctgaatattgcaagttgcgtagataactgtaaaaaggcagcctcacaaaggcttgagttgttgaaggcggtgccagaatatttatctgggccggaagcaattcacgcacagattgatactaatttaatgataaatagaattaagaacactctgaaacatgaaaattacacatatgatcttaaagtaaatgaaagggattatcttttattacagttggaacaaaaatatatagcttcgagtaaacctcctaaagtcggagctcaaaaatggagtgctgacataaataaagaaattaattatttatgcgatgagatcgaagaaaaaaaacgcgaggtggtttgttgggagaataagaagaatgaatcatcacgaagacttgatttgtggagtacggcgacgaaatatttatctgacccgaaaggaattaaaccaccgattgatactgatgtaatactcaataacattaatgatgttcttaatcatgctggctacgtatataactataaagtgagagaaaaggataatcttgagaaaaagttgagtagaacccccctaacaagtcagatagaagtgaaccgtttacaaaccgagatcgcaaaaagatatagactaatagattattgggggaaaaaagcagatgaaacattactaatgtttatcttgtggaggaatgtgtttggttaaggtacccttgaggtgctgtttcagggaccaggaggtagtggatctgcttggagccatccacagttcgaaaaaggtggaggttctggcggtggatcaggtggaagtgcatggtctcaccctcagtttgagaaataaggatccggctgctaacaaagcccgaaaggaagctgagttggctgctgccaccgctgagcaataactagcataaccccttggggcctctaaacgggtcttgaggggttttttgctgaaaggaggaactatatccggatatcccgcaagaggcccggcagtaccggcataaccaagcctatgcctacagcatccagggtgacggtgccgaggatgacgatgagcgcattgttagatttcatacacggtgcctgactgcgttagcaatttaactgtgataaactaccgcattaaagcttatcgatgataagctgtcaaacatgagaattcttgaagacgaaagggcctcgtgatacgcctatttttataggttaatgtcatgataataatggtttcttagacgtcaggtggcacttttcggggaaatgtgcgcggaacccctatttgtttatttttctaaatacattcaaatatgtatccgctcatgagacaataaccctgataaatgcttcaataatattgaaaaaggaagagtatgagtattcaacatttccgtgtcgcccttattcccttttttgcggcattttgccttcctgtttttgctcacccagaaacgctggtgaaagtaaaagatgctgaagatcagttgggtgcacgagtgggttacatcgaactggatctcaacagcggtaagatccttgagagttttcgccccgaagaacgttttccaatgatgagcacttttaaagttctgctatgtggcgcggtattatcccgtgttgacgccgggcaagagcaactcggtcgccgcatacactattctcagaatgacttggttgagtactcaccagtcacagaaaagcatcttacggatggcatgacagtaagagaattatgcagtgctgccataaccatgagtgataacactgcggccaacttacttctgacaacgatcggaggaccgaaggagctaaccgcttttttgcacaacatgggggatcatgtaactcgccttgatcgttgggaaccggagctgaatgaagccataccaaacgacgagcgtgacaccacgatgcctgcagcaatggcaacaacgttgcgcaaactattaactggcgaactacttactctagcttcccggcaacaattaatagactggatggaggcggataaagttgcaggaccacttctgcgctcggcccttccggctggctggtttattgctgataaatctggagccggtgagcgtgggtctcgcggtatcattgcagcactggggccagatggtaagccctcccgtatcgtagttatctacacgacggggagtcaggcaactatggatgaacgaaatagacagatcgctgagataggtgcctcactgattaagcattggtaactgtcagaccaagtttactcatatatactttagattgatttaaaacttcatttttaatttaaaaggatctaggtgaagatcctttttgataatctcatgaccaaaatcccttaacgtgagttttcgttccactgagcgtcagaccccgtagaaaagatcaaaggatcttcttgagatcctttttttctgcgcgtaatctgctgcttgcaaacaaaaaaaccaccgctaccagcggtggtttgtttgccggatcaagagctaccaactctttttccgaaggtaactggcttcagcagagcgcagataccaaatactgtccttctagtgtagccgtagttaggccaccacttcaagaactctgtagcaccgcctacatacctcgctctgctaatcctgttaccagtggctgctgccagtggcgataagtcgtgtcttaccgggttggactcaagacgatagttaccggataaggcgcagcggtcgggctgaacggggggttcgtgcacacagcccagcttggagcgaacgacctacaccgaactgagatacctacagcgtgagctatgagaaagcgccacgcttcccgaagggagaaaggcggacaggtatccggtaagcggcagggtcggaacaggagagcgcacgagggagcttccagggggaaacgcctggtatctttatagtcctgtcgggtttcgccacctctgacttgagcgtcgatttttgtgatgctcgtcaggggggcggagcctatggaaaaacgccagcaacgcggcctttttacggttcctggccttttgctggccttttgctcacatgttctttcctgcgttatcccctgattctgtggataaccgtattaccgcctttgagtgagctgataccgctcgccgcagccgaacgaccgagcgcagcgagtcagtgagcgaggaagcggaagagcgcctgatgcggtattttctccttacgcatctgtgcggtatttcacaccgcatatatggtgcactctcagtacaatctgctctgatgccgcatagttaagccagtatacactccgctatcgctacgtgactgggtcatggctgcgccccgacacccgccaacacccgctgacgcgccctgacgggcttgtctgctcccggcatccgcttacagacaagctgtgaccgtctccgggagctgcatgtgtcagaggttttcaccgtcatcaccgaaacgcgcgaggcagctgcggtaaagctcatcagcgtggtcgtgaagcgattcacagatgtctgcctgttcatccgcgtccagctcgttgagtttctccagaagcgttaatgtctggcttctgataaagcgggccatgttaagggcggttttttcctgtttggtcactgatgcctccgtgtaagggggatttctgttcatgggggtaatgataccgatgaaacgagagaggatgctcacgatacgggttactgatgatgaacatgcccggttactggaacgttgtgagggtaaacaactggcggtatggatgcggcgggaccagagaaaaatcactcagggtcaatgccagcgcttcgttaatacagatgtaggtgttccacagggtagccagcagcatcctgcgatgcagatccggaacataatggtgcagggcgctgacttccgcgtttccagactttacgaaacacggaaaccgaagaccattcatgttgttgctcaggtcgcagacgttttgcagcagcagtcgcttcacgttcgctcgcgtatcggtgattcattctgctaaccagtaaggcaaccccgccagcctagccgggtcctcaacgacaggagcacgatcatgcgcacccgtggccaggacccaacgctgcccgagatgcgccgcgtgcggctgctggagatggcggacgcgatggatatgttctgccaagggttggtttgcgcattcacagttctccgcaagaattgattggctccaattcttggagtggtgaatccgttagcgaggtgccgccggcttccattcaggtcgaggtggcccggctccatgcaccgcgacgcaacgcggggaggcagacaaggtatagggcggcgcctacaatccatgccaacccgttccatgtgctcgccgaggcggcataaatcgccgtgacgatcagcggtccagtgatcgaagttaggctggtaagagccgcgagcgatccttgaagctgtccctgatggtcgtcatctacctgcctggacagcatggcctgcaacgcgggcatcccgatgccgccggaagcgagaagaatcataatggggaaggccatccagcctcgcgtcgcgaacgccagcaagacgtagcccagcgcgtcggccgccatgccggcgataatggcctgcttctcgccgaaacgtttggtggcgggaccagtgacgaaggcttgagcgagggcgtgcaagattccgaataccgcaagcgacaggccgatcatcgtcgcgctccagcgaaagcggtcctcgccgaaaatgacccagagcgctgccggcacctgtcctacgagttgcatgataaagaagacagtcataagtgcggcgacgatagtcatgccccgcgcccaccggaaggagctgactgggttgaaggctctcaagggcatcggtcgagatcccggtgcctaatgagtgagctaacttacattaattgcgttgcgctcactgcccgctttccagtcgggaaacctgtcgtgccagctgcattaatgaatcggccaacgcgcggggagaggcggtttgcgtattgggcgccagggtggtttttcttttcaccagtgagacgggcaacagctgattgcccttcaccgcctggccctgagagagttgcagcaagcggtccacgctggtttgccccagcaggcgaaaatcctgtttgatggtggttaacggcgggatataacatgagctgtcttcggtatcgtcgtatcccactaccgagatatccgcaccaacgcgcagcccggactcggtaatggcgcgcattgcgcccagcgccatctgatcgttggcaaccagcatcgcagtgggaacgatgccctcattcagcatttgcatggtttgttgaaaaccggacatggcactccagtcgccttcccgttccgctatcggctgaatttgattgcgagtgagatatttatgccagccagccagacgcagacgcgccgagacagaacttaatgggcccgctaacagcgcgatttgctggtgacccaatgcgaccagatgctccacgcccagtcgcgtaccgtcttcatgggagaaaataatactgttgatgggtgtc

SEQ ID NO: 131 - protein, 929 aa, Serratia entomophila
MLNRFSRLVLARSFAEKRIQSFEHSSSKFKSSDEFKVDKSIPLDAQNASLNDMASKTDNLINQLEQFTGDKKESISANLKNIQLMIGDIMENRNNRNDNLNFHTYVLVGKNTTYDEISNYYGFAEFKFSINNGNLTLNNLIGHPYVVINKYPEFRDYLIRNGVITQPELEPYNIKNVARYLGSKAVSSEIGYYESIPATKVKILSFTGANPITQKLGNTLQSISDLFSKKRFSDEPNDAITQDELFTRQTDLYTYDEMINHLKTIVRTTFTPVKPIEEISSEKTDAAIKGIMTNGDAEIISENIIESKNSLDHDTSYFSHEVISAVDRAYEKVNSVKSLFERAESQPEIKSQLKSLINEATGLNDEVIIDIDKVDVSSISDMAYNRFKDNINTLHDYLSKQKSGGYTSFVLFKYRQFNPSKPDAFAMPYDSKKRIFLAMLPENQRHGGLVDTVTHEASHNSSYTLDHTYIGNARSNTGSFPSSFEPPTRDSRYFYENERVGKLSAKYALDLPENANITQNQLAQADILLRNSRLTKADTLLNAAEYNAYMIDVLSRVKINGSHIEFEENSSRSKRSVSGGNHKLDDIIILASMNATLPRREGGEFESSTFKKTLTEFINKGTTSSQVDPVYASYLPAFNTIVDSEGITLQQVKDLKSALPATGNDLRAQARYNYAVLQYLSGSAGIKLPIDTDVIRNSINDDLNIASCVDNCKKAASQRLELLKAVPEYLSGPEAIHAQIDTNLMINRIKNTLKHENYTYDLKVNERDYLLLQLEQKYIASSKPPKVGAQKWSADINKEINYLCDEIEEKKREVVCWENKKNESSRRLDLWSTATKYLSDPKGIKPPIDTDVILNNINDVLNHAGYVYNYKVREKDNLEKKLSRTPLTSQIEVNRLQTEIAKRYRLIDYWGKKADETLLMFILWRNVFG

SEQ ID NO: 132 - DNA, 11299 bp, Serratia entomophila
  source 1..11299: mol_type = other DNA
  CDS 933..6455: note = Afp18 N-terminal truncation (M) 527
tggtcagagacatcaagaaataacgccggaacattagtgcaggcagcttccacagcaatggcatcctggtcatccagcggatagttaatgatcagcccactgacgcgttgcgcgagaagattgtgcaccgccgctttacaggcttcgacgccgcttcgttctaccatcgacaccaccacgctggcacccagttgatcggcgcgagatttaatcgccgcgacaatttgcgacggcgcgtgcagggccagactggaggtggcaacgccaatcagcaacgactgtttgcccgccagttgttgtgccacgcggttgggaatgtaattcagctccgccatcgccgcttccactttttcccgcgttttcgcagaaacgtggctggcctggttcaccacgcgggaaacggtctgataagagacaccggcatactctgcgacatcgtataacgttactggtttcacattcaccaccctgaattgactctcttccgggcgctatcatgccataccgcgaaaggttttgcgccattcgatggtgtccgggatctcgacgctctcccttatgcgactcctgcattaggaagcagcccagtagtaggttgaggccgttgagcaccgccgccgcaaggaatggtgcatgcaaggagatggcgcccaacagtcccccggccacggggcctgccaccatacccacgccgaaacaagcgctcatgagcccgaagtggcgagcccgatcttccccatcggtgatgtcggcgatataggcgccagcaaccgcacctgtggcgccggtgatgccggccacgatgcgtccggcgtagaggatcgagatctcgatcccgcgaaattaatacgactcactataggggaattgtgagcggataacaattcccctctagaaataattttgtttaactttaagaaggagatatacatatgtcagttgagcgcttgcctgccgctgtttcctctctgaaggccgtggataaattactgccggatttggcaggtgacctcacggcgagtatcgccgccctgagcaacgcccttcaggcagccgaataccccgcccgcgactttagcgaagcaaaaatacaggccggctatgcacaattgtgggcgacaaaggtgaaggaaagtctgtcggcagcgtctgcacggctgaccgaaagaccgctggatgaacattcacggggcgcacgccttgccaaacattgggcaaacctcgccaaagaacggagcgtgggtaattatccgccgccggatgcacagcaggtacttgcctccctgaaggaacaggggctattagcggggaccctttcaaccggagatccggccgggtatcttttcgccacccggcttgccggtgagcttgaaaatgccggtaatggtgaattgcgattaccgatgagtccggagcaatatgttgctttagagaagggacttgttgagtatattgtaaaatggggacaacggcggatctcacaaggagtcacccgcattgttattgagttgtcctttgagcaggctctggatacggtatcgttcaacgtgtccaagctcttccggttaccttataaggtgctgaaggcctcgataaaaataccgtacaatgtcaataaggttaataattataccatgccgggccatgataagccctataaggcaatttatggcttgctgggaaaaaagcttaagcaacttggctttaatttactgacggcacccgtgcctggcgtgatgaaacttgtggctggcaccgggataaccgcaggtgcaggcgtgcataatttacgtgtcgaaaatagagagaaaacattcagcgcggtttatcaacacgtggtggaaggaaagcaaagtgaaaaaataaaaatggactccgtgaagtcgatgatttttgattcagtgctcgataccgccactacggccgcttttaaagggggacgaagagcctggcaatcaggaagaaataaaaacgacattgaaatcaatgaggtaacactttctcaagcacagcagcgccaagtggcagccaacaatgttgacactgcatgggggaatgctgctgcgaatgagaggaaggttgagccagtgagtcattcatcaccattacagcaacaaaccgatgttaggccgttctctgataagagtgaccaggatgctgctcaacctcgagtacgtaaacgggcagtggcggatatggctccccctccccctcatcaatggcataataacattcctgccaacacgacgctacagtcagaacattttgattttgatcgtgacatacgttatcagggcttctccgatgagaagaaaaaacaaacctatttacatggtattcaacttgtattgcttcagatacaaaatgatggacgctttgcacagaagatcaggaataatgcctaccttgccagtataggcgtttcgaacttagtacctgtcgatatagaaggatataaacttaaaaatacatttcttcttcctgatagcccaagtgctaaatctggagttattgttcgcttagattctgaaaatccttattactatgttggcaaagggagtgatcttttagaagacatcaaatgggccatgcctcatgatgctaatgaacagaagtatgaatatatgcctgattctgatgggaacgctcacttttaccgtctgcgcaacggttttgatatctttaatgatattaggatggggaattcaagtttcgaatatttctttaattataataatccggagccgataagcatcacgagactttcttcatatcttgcaaatactattgagggtgactataaaaacggatcgtcgcccccaaaaaacaaactattaatttccagagcgattactggtgctcatattcctgacccaggggtcactgcaaccgccgctggatatcatatcgaattcacctgggataatttgacttcagcagagtatctgaggtcattttcaaggcccttctctaccctcagtggagaaatgcagttagtgtctagctccattaatggagaaacgatacaggaaacagagctgcatgttcatcaggctgaatatataggaagctgggttgatgctactgtcggggccatcacatctttcacgccggagggatgggttctcaataccacactatcggcagcggacattgctgctgatttgacagaagataaggatcctgacccaatggcggttgctggcctggttgtaggatgcattcctggtggtcggattgcagctaaagtcggaaagttcacccgtattggcggtaaggttgttaaatacgggcttatgcttggcaataaagcggtcgacctggccatcgtagggaagagcgttaagatagctgtagacacgggtgatccactcgcaatttataaggcgcttctgatcagtggcataggtactacgaattcttacgatatggcaaagaatatgtcatcaaagctaaaaatcagcaagaaactggaagacagtgttcaattagataaaccactacaaaatctaaggggaggaagcaagcgtcctgaagagggtgaatcaacctcgcagaagcgttcacagccagatgagagtccagaaaatagtcaggaggctgtatattcaggcccctccggcagagctcgggtgacttttgaccagacgaccgaacatcatataatgcttaatagattttccagacttgtgttagctagaagttttgcagagaaaagaatacagtcttttgaacacagttcttcgaaatttaaaagcagtgacgagtttaaggtagataaaagcatacctttagatgcacaaaatgcttcacttaacgacatggcgagtaagacagataacttaattaatcagctagaacaatttacaggagataagaaagaatccatttccgccaatctgaaaaacatccagttaatgattggtgatataatggaaaatagaaacaataggaatgataatttaaatttccatacttatgtcttggttgggaaaaatacaacatatgacgaaataagtaactattatggttttgctgagtttaaattttcaataaataatggcaatcttactcttaacaaccttataggccacccttatgtcgtcattaataaataccctgaatttagagattatttgataagaaatggagtcatcacccaacccgagcttgaaccatataacataaagaatgtggctcggtatcttggctctaaagcggtgagcagtgagattggttattatgaatccattccagctactaaagtgaagattctctcgtttactggagccaatccgattacgcaaaaattaggtaatacacttcagagtatctctgatcttttttcaaaaaaacgattttcggacgaaccgaatgacgccatcactcaggatgaactatttacccgtcagactgatttatatacttatgatgagatgataaatcatctaaaaactatagtaagaacgacattcacacctgttaaaccgatagaagaaatatccagtgaaaaaactgatgcggccattaaaggaataatgaccaatggggatgcggaaataatttccgaaaacattatcgagagcaaaaatagtttagaccatgatacaagttatttttctcatgaagttatttcagctgttgatcgtgcatatgaaaaagtaaactccgtgaaatctctttttgaacgtgcagaatctcagcctgagattaaatctcaattaaaatcattaattaatgaagccactggattgaatgatgaggttatcattgatattgataaagtagatgtttctagcatatcagacatggcctataacaggtttaaagataatatcaatactctacatgactatctctctaagcaaaaatcagggggttatacatcctttgttttatttaaatatcgccagtttaatccatccaagcctgatgcctttgccatgccctatgacagtaagaaaagaatttttctggctatgttgccagaaaatcagcgccatggtggattagttgatacggtgacccatgaagcttcacataattcttcttacacattagatcatacttatatagggaacgcgcggagtaacaccggttcatttccttcctcatttgaacctccaactcgagattcgaggtatttttatgaaaatgaacgggtaggtaaactgagtgcaaagtatgctttagacttacccgaaaatgctaatatcacccaaaatcaactagcgcaggcagatattctgttaagaaacagcaggttgactaaagcagatacgcttctgaatgctgcagaatataatgcttatatgattgacgttctaagccgggtaaaaataaacggctcacatattgagtttgaagaaaactcatccagaagcaaacgctctgtttccggaggaaatcataaacttgatgatataattatactggcttcgatgaacgctacgcttcctaggagggaggggggggaatttgagtcatctaccttcaagaaaacattaacggaatttataaacaagggtacgaccagcagtcaggttgatcctgtttatgcatcctatctaccagcgtttaataccattgtagatagcgagggtattacattgcaacaggtgaaagacttaaaatcagctctgcccgcaaccggcaacgatctgagggctcaagccagatataactatgcggtgctacaatatttatctgggtcggcaggaattaagctaccaattgatactgatgtaatacgaaatagcattaatgatgatctgaatattgcaagttgcgtagataactgtaaaaaggcagcctcacaaaggcttgagttgttgaaggcggtgccagaatatttatctgggccggaagcaattcacgcacagattgatactaatttaatgataaatagaattaagaacactctgaaacatgaaaattacacatatgatcttaaagtaaatgaaagggattatcttttattacagttggaacaaaaatatatagcttcgagtaaacctcctaaagtcggagctcaaaaatggagtgctgacataaataaagaaattaattatttatgcgatgagatcgaagaaaaaaaacgcgaggtggtttgttgggagaataagaagaatgaatcatcacgaagacttgatttgtggagtacggcgacgaaatatttatctgacccgaaaggaattaaaccaccgattgatactgatgtaatactcaataacattaatgatgttcttaatcatgctggctacgtatataactataaagtgagagaaaaggataatcttgagaaaaagttgagtagaacccccctaacaagtcagatagaagtgaaccgtttacaaaccgagatcgcaaaaagatatagactaatagattattgggggaaaaaagcagatgaaacattactaatgtttatcttgtggaggaatgtgtttggttaaggtacccttgaggtgctgtttcagggaccaggaggtagtggatctgcttggagccatccacagttcgaaaaaggtggaggttctggcggtggatcaggtggaagtgcatggtctcaccctcagtttgagaaataaggatccggctgctaacaaagcccgaaaggaagctgagttggctgctgccaccgctgagcaataactagcataaccccttggggcctctaaacgggtcttgaggggttttttgctgaaaggaggaactatatccggatatcccgcaagaggcccggcagtaccggcataaccaagcctatgcctacagcatccagggtgacggtgccgaggatgacgatgagcgcattgttagatttcatacacggtgcctgactgcgttagcaatttaactgtgataaactaccgcattaaagcttatcgatgataagctgtcaaacatgagaattcttgaagacgaaagggcctcgtgatacgcctatttttataggttaatgtcatgataataatggtttcttagacgtcaggtggcacttttcggggaaatgtgcgcggaacccctatttgtttatttttctaaatacattcaaatatgtatccgctcatgagacaataaccctgataaatgcttcaataatattgaaaaaggaagagtatgagtattcaacatttccgtgtcgcccttattcccttttttgcggcattttgccttcctgtttttgctcacccagaaacgctggtgaaagtaaaagatgctgaagatcagttgggtgcacgagtgggttacatcgaactggatctcaacagcggtaagatccttgagagttttcgccccgaagaacgttttccaatgatgagcacttttaaagttctgctatgtggcgcggtattatcccgtgttgacgccgggcaagagcaactcggtcgccgcatacactattctcagaatgacttggttgagtactcaccagtcacagaaaagcatcttacggatggcatgacagtaagagaattatgcagtgctgccataaccatgagtgataacactgcggccaacttacttctgacaacgatcggaggaccgaaggagctaaccgcttttttgcacaacatgggggatcatgtaactcgccttgatcgttgggaaccggagctgaatgaagccataccaaacgacgagcgtgacaccacgatgcctgcagcaatggcaacaacgttgcgcaaactattaactggcgaactacttactctagcttcccggcaacaattaatagactggatggaggcggataaagttgcaggaccacttctgcgctcggcccttccggctggctggtttattgctgataaatctggagccggtgagcgtgggtctcgcggtatcattgcagcactggggccagatggtaagccctcccgtatcgtagttatctacacgacggggagtcaggcaactatggatgaacgaaatagacagatcgctgagataggtgcctcactgattaagcattggtaactgtcagaccaagtttactcatatatactttagattgatttaaaacttcatttttaatttaaaaggatctaggtgaagatcctttttgataatctcatgaccaaaatcccttaacgtgagttttcgttccactgagcgtcagaccccgtagaaaagatcaaaggatcttcttgagatcctttttttctgcgcgtaatctgctgcttgcaaacaaaaaaaccaccgctaccagcggtggtttgtttgccggatcaagagctaccaactctttttccgaaggtaactggcttcagcagagcgcagataccaaatactgtccttctagtgtagccgtagttaggccaccacttcaagaactctgtagcaccgcctacatacctcgctctgctaatcctgttaccagtggctgctgccagtggcgataagtcgtgtcttaccgggttggactcaagacgatagttaccggataaggcgcagcggtcgggctgaacggggggttcgtgcacacagcccagcttggagcgaacgacctacaccgaactgagatacctacagcgtgagctatgagaaagcgccacgcttcccgaagggagaaaggcggacaggtatccggtaagcggcagggtcggaacaggagagcgcacgagggagcttccagggggaaacgcctggtatctttatagtcctgtcgggtttcgccacctctgacttgagcgtcgatttttgtgatgctcgtcaggggggcggagcctatggaaaaacgccagcaacgcggcctttttacggttcctggccttttgctggccttttgctcacatgttctttcctgcgttatcccctgattctgtggataaccgtattaccgcctttgagtgagctgataccgctcgccgcagccgaacgaccgagcgcagcgagtcagtgagcgaggaagcggaagagcgcctgatgcggtattttctccttacgcatctgtgcggtatttcacaccgcatatatggtgcactctcagtacaatctgctctgatgccgcatagttaagccagtatacactccgctatcgctacgtgactgggtcatggctgcgccccgacacccgccaacacccgctgacgcgccctgacgggcttgtctgctcccggcatccgcttacagacaagctgtgaccgtctccgggagctgcatgtgtcagaggttttcaccgtcatcaccgaaacgcgcgaggcagctgcggtaaagctcatcagcgtggtcgtgaagcgattcacagatgtctgcctgttcatccgcgtccagctcgttgagtttctccagaagcgttaatgtctggcttctgataaagcgggccatgttaagggcggttttttcctgtttggtcactgatgcctccgtgtaagggggatttctgttcatgggggtaatgataccgatgaaacgagagaggatgctcacgatacgggttactgatgatgaacatgcccggttactggaacgttgtgagggtaaacaactggcggtatggatgcggcgggaccagagaaaaatcactcagggtcaatgccagcgcttcgttaatacagatgtaggtgttccacagggtagccagcagcatcctgcgatgcagatccggaacataatggtgcagggcgctgacttccgcgtttccagactttacgaaacacggaaaccgaagaccattcatgttgttgctcaggtcgcagacgttttgcagcagcagtcgcttcacgttcgctcgcgtatcggtgattcattctgctaaccagtaaggcaaccccgccagcctagccgggtcctcaacgacaggagcacgatcatgcgcacccgtggccaggacccaacgctgcccgagatgcgccgcgtgcggctgctggagatggcggacgcgatggatatgttctgccaagggttggtttgcgcattcacagttctccgcaagaattgattggctccaattcttggagtggtgaatccgttagcgaggtgccgccggcttccattcaggtcgaggtggcccggctccatgcaccgcgacgcaacgcggggaggcagacaaggtatagggcggcgcctacaatccatgccaacccgttccatgtgctcgccgaggcggcataaatcgccgtgacgatcagcggtccagtgatcgaagttaggctggtaagagccgcgagcgatccttgaagctgtccctgatggtcgtcatctacctgcctggacagcatggcctgcaacgcgggcatcccgatgccgccggaagcgagaagaatcataatggggaaggccatccagcctcgcgtcgcgaacgccagcaagacgtagcccagcgcgtcggccgccatgccggcgataatggcctgcttctcgccgaaacgtttggtggcgggaccagtgacgaaggcttgagcgagggcgtgcaagattccgaataccgcaagcgacaggccgatcatcgtcgcgctccagcgaaagcggtcctcgccgaaaatgacccagagcgctgccggcacctgtcctacgagttgcatgataaagaagacagtcataagtgcggcgacgatagtcatgccccgcgcccaccggaaggagctgactgggttgaaggctctcaagggcatcggtcgagatcccggtgcctaatgagtgagctaacttacattaattgcgttgcgctcactgcccgctttccagtcgggaaacctgtcgtgccagctgcattaatgaatcggccaacgcgcggggagaggcggtttgcgtattgggcgccagggtggtttttcttttcaccagtgagacgggcaacagctgattgcccttcaccgcctggccctgagagagttgcagcaagcggtccacgctggtttgccccagcaggcgaaaatcctgtttgatggtggttaacggcgggatataacatgagctgtcttcggtatcgtcgtatcccactaccgagatatccgcaccaacgcgcagcccggactcggtaatggcgcgcattgcgcccagcgccatctgatcgttggcaaccagcatcgcagtgggaacgatgccctcattcagcatttgcatggtttgttgaaaaccggacatggcactccagtcgccttcccgttccgctatcggctgaatttgattgcgagtgagatatttatgccagccagccagacgcagacgcgccgagacagaacttaatgggcccgctaacagcgcgatttgctggtgacccaatgcgaccagatgctccacgcccagtcgcgtaccgtcttcatgggagaaaataatactgttgatgggtgtc

SEQ ID NO: 133 - protein, 1840 aa, Serratia entomophila
MSVERLPAAVSSLKAVDKLLPDLAGDLTASIAALSNALQAAEYPARDFSEAKIQAGYAQLWATKVKESLSAASARLTERPLDEHSRGARLAKHWANLAKERSVGNYPPPDAQQVLASLKEQGLLAGTLSTGDPAGYLFATRLAGELENAGNGELRLPMSPEQYVALEKGLVEYIVKWGQRRISQGVTRIVIELSFEQALDTVSFNVSKLFRLPYKVLKASIKIPYNVNKVNNYTMPGHDKPYKAIYGLLGKKLKQLGFNLLTAPVPGVMKLVAGTGITAGAGVHNLRVENREKTFSAVYQHVVEGKQSEKIKMDSVKSMIFDSVLDTATTAAFKGGRRAWQSGRNKNDIEINEVTLSQAQQRQVAANNVDTAWGNAAANERKVEPVSHSSPLQQQTDVRPFSDKSDQDAAQPRVRKRAVADMAPPPPHQWHNNIPANTTLQSEHFDFDRDIRYQGFSDEKKKQTYLHGIQLVLLQIQNDGRFAQKIRNNAYLASIGVSNLVPVDIEGYKLKNTFLLPDSPSAKSGVIVRLDSENPYYYVGKGSDLLEDIKWAMPHDANEQKYEYMPDSDGNAHFYRLRNGFDIFNDIRMGNSSFEYFFNYNNPEPISITRLSSYLANTIEGDYKNGSSPPKNKLLISRAITGAHIPDPGVTATAAGYHIEFTWDNLTSAEYLRSFSRPFSTLSGEMQLVSSSINGETIQETELHVHQAEYIGSWVDATVGAITSFTPEGWVLNTTLSAADIAADLTEDKDPDPMAVAGLVVGCIPGGRIAAKVGKFTRIGGKVVKYGLMLGNKAVDLAIVGKSVKIAVDTGDPLAIYKALLISGIGTTNSYDMAKNMSSKLKISKKLEDSVQLDKPLQNLRGGSKRPEEGESTSQKRSQPDESPENSQEAVYSGPSGRARVTFDQTTEHHIMLNRFSRLVLARSFAEKRIQSFEHSSSKFKSSDEFKVDKSIPLDAQNASLNDMASKTDNLINQLEQFTGDKKESISANLKNIQLMIGDIMENRNNRNDNLNFHTYVLVGKNTTYDEISNYYGFAEFKFSINNGNLTLNNLIGHPYVVINKYPEFRDYLIRNGVITQPELEPYNIKNVARYLGSKAVSSEIGYYESIPATKVKILSFTGANPITQKLGNTLQSISDLFSKKRFSDEPNDAITQDELFTRQTDLYTYDEMINHLKTIVRTTFTPVKPIEEISSEKTDAAIKGIMTNGDAEIISENIIESKNSLDHDTSYFSHEVISAVDRAYEKVNSVKSLFERAESQPEIKSQLKSLINEATGLNDEVIIDIDKVDVSSISDMAYNRFKDNINTLHDYLSKQKSGGYTSFVLFKYRQFNPSKPDAFAMPYDSKKRIFLAMLPENQRHGGLVDTVTHEASHNSSYTLDHTYIGNARSNTGSFPSSFEPPTRDSRYFYENERVGKLSAKYALDLPENANITQNQLAQADILLRNSRLTKADTLLNAAEYNAYMIDVLSRVKINGSHIEFEENSSRSKRSVSGGNHKLDDIIILASMNATLPRREGGEFESSTFKKTLTEFINKGTTSSQVDPVYASYLPAFNTIVDSEGITLQQVKDLKSALPATGNDLRAQARYNYAVLQYLSGSAGIKLPIDTDVIRNSINDDLNIASCVDNCKKAASQRLELLKAVPEYLSGPEAIHAQIDTNLMINRIKNTLKHENYTYDLKVNERDYLLLQLEQKYIASSKPPKVGAQKWSADINKEINYLCDEIEEKKREVVCWENKKNESSRRLDLWSTATKYLSDPKGIKPPIDTDVILNNINDVLNHAGYVYNYKVREKDNLEKKLSRTPLTSQIEVNRLQTEIAKRYRLIDYWGKKADETLLMFILWRNVFG

SEQ ID NO: 134 - DNA, 12217 bp, Serratia entomophila
  source 1..12217: mol_type = other DNA
  CDS 933..7373: note = Afp18 N-terminal truncation M221
tggtcagagacatcaagaaataacgccggaacattagtgcaggcagcttccacagcaatggcatcctggtcatccagcggatagttaatgatcagcccactgacgcgttgcgcgagaagattgtgcaccgccgctttacaggcttcgacgccgcttcgttctaccatcgacaccaccacgctggcacccagttgatcggcgcgagatttaatcgccgcgacaatttgcgacggcgcgtgcagggccagactggaggtggcaacgccaatcagcaacgactgtttgcccgccagttgttgtgccacgcggttgggaatgtaattcagctccgccatcgccgcttccactttttcccgcgttttcgcagaaacgtggctggcctggttcaccacgcgggaaacggtctgataagagacaccggcatactctgcgacatcgtataacgttactggtttcacattcaccaccctgaattgactctcttccgggcgctatcatgccataccgcgaaaggttttgcgccattcgatggtgtccgggatctcgacgctctcccttatgcgactcctgcattaggaagcagcccagtagtaggttgaggccgttgagcaccgccgccgcaaggaatggtgcatgcaaggagatggcgcccaacagtcccccggccacggggcctgccaccatacccacgccgaaacaagcgctcatgagcccgaagtggcgagcccgatcttccccatcggtgatgtcggcgatataggcgccagcaaccgcacctgtggcgccggtgatgccggccacgatgcgtccggcgtagaggatcgagatctcgatcccgcgaaattaatacgactcactataggggaattgtgagcggataacaattcccctctagaaataattttgtttaactttaagaaggagatatacatatgacggcagagacgtcaggtcatgccgcctgggcttcccttatgcaggcccggacagcggcgtgggaggccggtaagtcagccaccgtcgatgcgatgattgcgacttcacagcacgaagcagaaaaagccaataaaaaagcccgtgagcttcagggcgattcacaggctttctttagtcatgtcgccgcctatcttcagagcctctccagcgatttggcaaaagtgtcgattaacatggggcagagcacctcttcctcgactatacggaacgaagcagaaaaagccagtgagcttcagggcgattcacagactttcgttagtcatgtcgccgcctatcttcagagcctccctagcgatttggcaaaagtgccgattaacatgtggcagaatatggattttgttaagacaaaattacaagcgcaaactgcagttgcgggaatgaaagtgcatgcgcaccggcttgtccggatcgcacagcatggtcactccaccaaaacccctgcgaaggatcccgaacaggtcgttaccgattccatcatcagaagcattttatggctgtggcagcagccggccatcaaaatccagtgcgccagcactgcgttgttgtcaaaagtgggtgagctgaaaaaaattgaggggatactggcttcttacgccgtgacggatgagctgggaaacgaacaagaacgccgcaaccctccgggtgaggaggacctggatgcacagctcagggaatgggtgagcgccagccttaagcaggaaaaccccgaaaaccagcgggcggtaaaagtggtgacgctggagcggctgctgggcggtgatatcgccagtgcccgcaacctggtggaacgtctgggaaaagcggaagagggtattcagaatctgctcaggcggcagcaggttgctgtcctgaaaatgtcagttgagcgcttgcctgccgctgtttcctctctgaaggccgtggataaattactgccggatttggcaggtgacctcacggcgagtatcgccgccctgagcaacgcccttcaggcagccgaataccccgcccgcgactttagcgaagcaaaaatacaggccggctatgcacaattgtgggcgacaaaggtgaaggaaagtctgtcggcagcgtctgcacggctgaccgaaagaccgctggatgaacattcacggggcgcacgccttgccaaacattgggcaaacctcgccaaagaacggagcgtgggtaattatccgccgccggatgcacagcaggtacttgcctccctgaaggaacaggggctattagcggggaccctttcaaccggagatccggccgggtatcttttcgccacccggcttgccggtgagcttgaaaatgccggtaatggtgaattgcgattaccgatgagtccggagcaatatgttgctttagagaagggacttgttgagtatattgtaaaatggggacaacggcggatctcacaaggagtcacccgcattgttattgagttgtcctttgagcaggctctggatacggtatcgttcaacgtgtccaagctcttccggttaccttataaggtgctgaaggcctcgataaaaataccgtacaatgtcaataaggttaataattataccatgccgggccatgataagccctataaggcaatttatggcttgctgggaaaaaagcttaagcaacttggctttaatttactgacggcacccgtgcctggcgtgatgaaacttgtggctggcaccgggataaccgcaggtgcaggcgtgcataatttacgtgtcgaaaatagagagaaaacattcagcgcggtttatcaacacgtggtggaaggaaagcaaagtgaaaaaataaaaatggactccgtgaagtcgatgatttttgattcagtgctcgataccgccactacggccgcttttaaagggggacgaagagcctggcaatcaggaagaaataaaaacgacattgaaatcaatgaggtaacactttctcaagcacagcagcgccaagtggcagccaacaatgttgacactgcatgggggaatgctgctgcgaatgagaggaaggttgagccagtgagtcattcatcaccattacagcaacaaaccgatgttaggccgttctctgataagagtgaccaggatgctgctcaacctcgagtacgtaaacgggcagtggcggatatggctccccctccccctcatcaatggcataataacattcctgccaacacgacgctacagtcagaacattttgattttgatcgtgacatacgttatcagggcttctccgatgagaagaaaaaacaaacctatttacatggtattcaacttgtattgcttcagatacaaaatgatggacgctttgcacagaagatcaggaataatgcctaccttgccagtataggcgtttcgaacttagtacctgtcgatatagaaggatataaacttaaaaatacatttcttcttcctgatagcccaagtgctaaatctggagttattgttcgcttagattctgaaaatccttattactatgttggcaaagggagtgatcttttagaagacatcaaatgggccatgcctcatgatgctaatgaacagaagtatgaatatatgcctgattctgatgggaacgctcacttttaccgtctgcgcaacggttttgatatctttaatgatattaggatggggaattcaagtttcgaatatttctttaattataataatccggagccgataagcatcacgagactttcttcatatcttgcaaatactattgagggtgactataaaaacggatcgtcgcccccaaaaaacaaactattaatttccagagcgattactggtgctcatattcctgacccaggggtcactgcaaccgccgctggatatcatatcgaattcacctgggataatttgacttcagcagagtatctgaggtcattttcaaggcccttctctaccctcagtggagaaatgcagttagtgtctagctccattaatggagaaacgatacaggaaacagagctgcatgttcatcaggctgaatatataggaagctgggttgatgctactgtcggggccatcacatctttcacgccggagggatgggttctcaataccacactatcggcagcggacattgctgctgatttgacagaagataaggatcctgacccaatggcggttgctggcctggttgtaggatgcattcctggtggtcggattgcagctaaagtcggaaagttcacccgtattggcggtaaggttgttaaatacgggcttatgcttggcaataaagcggtcgacctggccatcgtagggaagagcgttaagatagctgtagacacgggtgatccactcgcaatttataaggcgcttctgatcagtggcataggtactacgaattcttacgatatggcaaagaatatgtcatcaaagctaaaaatcagcaagaaactggaagacagtgttcaattagataaaccactacaaaatctaaggggaggaagcaagcgtcctgaagagggtgaatcaacctcgcagaagcgttcacagccagatgagagtccagaaaatagtcaggaggctgtatattcaggcccctccggcagagctcgggtgacttttgaccagacgaccgaacatcatataatgcttaatagattttccagacttgtgttagctagaagttttgcagagaaaagaatacagtcttttgaacacagttcttcgaaatttaaaagcagtgacgagtttaaggtagataaaagcatacctttagatgcacaaaatgcttcacttaacgacatggcgagtaagacagataacttaattaatcagctagaacaatttacaggagataagaaagaatccatttccgccaatctgaaaaacatccagttaatgattggtgatataatggaaaatagaaacaataggaatgataatttaaatttccatacttatgtcttggttgggaaaaatacaacatatgacgaaataagtaactattatggttttgctgagtttaaattttcaataaataatggcaatcttactcttaacaaccttataggccacccttatgtcgtcattaataaataccctgaatttagagattatttgataagaaatggagtcatcacccaacccgagcttgaaccatataacataaagaatgtggctcggtatcttggctctaaagcggtgagcagtgagattggttattatgaatccattccagctactaaagtgaagattctctcgtttactggagccaatccgattacgcaaaaattaggtaatacacttcagagtatctctgatcttttttcaaaaaaacgattttcggacgaaccgaatgacgccatcactcaggatgaactatttacccgtcagactgatttatatacttatgatgagatgataaatcatctaaaaactatagtaagaacgacattcacacctgttaaaccgatagaagaaatatccagtgaaaaaactgatgcggccattaaaggaataatgaccaatggggatgcggaaataatttccgaaaacattatcgagagcaaaaatagtttagaccatgatacaagttatttttctcatgaagttatttcagctgttgatcgtgcatatgaaaaagtaaactccgtgaaatctctttttgaacgtgcagaatctcagcctgagattaaatctcaattaaaatcattaattaatgaagccactggattgaatgatgaggttatcattgatattgataaagtagatgtttctagcatatcagacatggcctataacaggtttaaagataatatcaatactctacatgactatctctctaagcaaaaatcagggggttatacatcctttgttttatttaaatatcgccagtttaatccatccaagcctgatgcctttgccatgccctatgacagtaagaaaagaatttttctggctatgttgccagaaaatcagcgccatggtggattagttgatacggtgacccatgaagcttcacataattcttcttacacattagatcatacttatatagggaacgcgcggagtaacaccggttcatttccttcctcatttgaacctccaactcgagattcgaggtatttttatgaaaatgaacgggtaggtaaactgagtgcaaagtatgctttagacttacccgaaaatgctaatatcacccaaaatcaactagcgcaggcagatattctgttaagaaacagcaggttgactaaagcagatacgcttctgaatgctgcagaatataatgcttatatgattgacgttctaagccgggtaaaaataaacggctcacatattgagtttgaagaaaactcatccagaagcaaacgctctgtttccggaggaaatcataaacttgatgatataattatactggcttcgatgaacgctacgcttcctaggagggaggggggggaatttgagtcatctaccttcaagaaaacattaacggaatttataaacaagggtacgaccagcagtcaggttgatcctgtttatgcatcctatctaccagcgtttaataccattgtagatagcgagggtattacattgcaacaggtgaaagacttaaaatcagctctgcccgcaaccggcaacgatctgagggctcaagccagatataactatgcggtgctacaatatttatctgggtcggcaggaattaagctaccaattgatactgatgtaatacgaaatagcattaatgatgatctgaatattgcaagttgcgtagataactgtaaaaaggcagcctcacaaaggcttgagttgttgaaggcggtgccagaatatttatctgggccggaagcaattcacgcacagattgatactaatttaatgataaatagaattaagaacactctgaaacatgaaaattacacatatgatcttaaagtaaatgaaagggattatcttttattacagttggaacaaaaatatatagcttcgagtaaacctcctaaagtcggagctcaaaaatggagtgctgacataaataaagaaattaattatttatgcgatgagatcgaagaaaaaaaacgcgaggtggtttgttgggagaataagaagaatgaatcatcacgaagacttgatttgtggagtacggcgacgaaatatttatctgacccgaaaggaattaaaccaccgattgatactgatgtaatactcaataacattaatgatgttcttaatcatgctggctacgtatataactataaagtgagagaaaaggataatcttgagaaaaagttgagtagaacccccctaacaagtcagatagaagtgaaccgtttacaaaccgagatcgcaaaaagatatagactaatagattattgggggaaaaaagcagatgaaacattactaatgtttatcttgtggaggaatgtgtttggttaaggtacccttgaggtgctgtttcagggaccaggaggtagtggatctgcttggagccatccacagttcgaaaaaggtggaggttctggcggtggatcaggtggaagtgcatggtctcaccctcagtttgagaaataaggatccggctgctaacaaagcccgaaaggaagctgagttggctgctgccaccgctgagcaataactagcataaccccttggggcctctaaacgggtcttgaggggttttttgctgaaaggaggaactatatccggatatcccgcaagaggcccggcagtaccggcataaccaagcctatgcctacagcatccagggtgacggtgccgaggatgacgatgagcgcattgttagatttcatacacggtgcctgactgcgttagcaatttaactgtgataaactaccgcattaaagcttatcgatgataagctgtcaaacatgagaattcttgaagacgaaagggcctcgtgatacgcctatttttataggttaatgtcatgataataatggtttcttagacgtcaggtggcacttttcggggaaatgtgcgcggaacccctatttgtttatttttctaaatacattcaaatatgtatccgctcatgagacaataaccctgataaatgcttcaataatattgaaaaaggaagagtatgagtattcaacatttccgtgtcgcccttattcccttttttgcggcattttgccttcctgtttttgctcacccagaaacgctggtgaaagtaaaagatgctgaagatcagttgggtgcacgagtgggttacatcgaactggatctcaacagcggtaagatccttgagagttttcgccccgaagaacgttttccaatgatgagcacttttaaagttctgctatgtggcgcggtattatcccgtgttgacgccgggcaagagcaactcggtcgccgcatacactattctcagaatgacttggttgagtactcaccagtcacagaaaagcatcttacggatggcatgacagtaagagaattatgcagtgctgccataaccatgagtgataacactgcggccaacttacttctgacaacgatcggaggaccgaaggagctaaccgcttttttgcacaacatgggggatcatgtaactcgccttgatcgttgggaaccggagctgaatgaagccataccaaacgacgagcgtgacaccacgatgcctgcagcaatggcaacaacgttgcgcaaactattaactggcgaactacttactctagcttcccggcaacaattaatagactggatggaggcggataaagttgcaggaccacttctgcgctcggcccttccggctggctggtttattgctgataaatctggagccggtgagcgtgggtctcgcggtatcattgcagcactggggccagatggtaagccctcccgtatcgtagttatctacacgacggggagtcaggcaactatggatgaacgaaatagacagatcgctgagataggtgcctcactgattaagcattggtaactgtcagaccaagtttactcatatatactttagattgatttaaaacttcatttttaatttaaaaggatctaggtgaagatcctttttgataatctcatgaccaaaatcccttaacgtgagttttcgttccactgagcgtcagaccccgtagaaaagatcaaaggatcttcttgagatcctttttttctgcgcgtaatctgctgcttgcaaacaaaaaaaccaccgctaccagcggtggtttgtttgccggatcaagagctaccaactctttttccgaaggtaactggcttcagcagagcgcagataccaaatactgtccttctagtgtagccgtagttaggccaccacttcaagaactctgtagcaccgcctacatacctcgctctgctaatcctgttaccagtggctgctgccagtggcgataagtcgtgtcttaccgggttggactcaagacgatagttaccggataaggcgcagcggtcgggctgaacggggggttcgtgcacacagcccagcttggagcgaacgacctacaccgaactgagatacctacagcgtgagctatgagaaagcgccacgcttcccgaagggagaaaggcggacaggtatccggtaagcggcagggtcggaacaggagagcgcacgagggagcttccagggggaaacgcctggtatctttatagtcctgtcgggtttcgccacctctgacttgagcgtcgatttttgtgatgctcgtcaggggggcggagcctatggaaaaacgccagcaacgcggcctttttacggttcctggccttttgctggccttttgctcacatgttctttcctgcgttatcccctgattctgtggataaccgtattaccgcctttgagtgagctgataccgctcgccgcagccgaacgaccgagcgcagcgagtcagtgagcgaggaagcggaagagcgcctgatgcggtattttctccttacgcatctgtgcggtatttcacaccgcatatatggtgcactctcagtacaatctgctctgatgccgcatagttaagccagtatacactccgctatcgctacgtgactgggtcatggctgcgccccgacacccgccaacacccgctgacgcgccctgacgggcttgtctgctcccggcatccgcttacagacaagctgtgaccgtctccgggagctgcatgtgtcagaggttttcaccgtcatcaccgaaacgcgcgaggcagctgcggtaaagctcatcagcgtggtcgtgaagcgattcacagatgtctgcctgttcatccgcgtccagctcgttgagtttctccagaagcgttaatgtctggcttctgataaagcgggccatgttaagggcggttttttcctgtttggtcactgatgcctccgtgtaagggggatttctgttcatgggggtaatgataccgatgaaacgagagaggatgctcacgatacgggttactgatgatgaacatgcccggttactggaacgttgtgagggtaaacaactggcggtatggatgcggcgggaccagagaaaaatcactcagggtcaatgccagcgcttcgttaatacagatgtaggtgttccacagggtagccagcagcatcctgcgatgcagatccggaacataatggtgcagggcgctgacttccgcgtttccagactttacgaaacacggaaaccgaagaccattcatgttgttgctcaggtcgcagacgttttgcagcagcagtcgcttcacgttcgctcgcgtatcggtgattcattctgctaaccagtaaggcaaccccgccagcctagccgggtcctcaacgacaggagcacgatcatgcgcacccgtggccaggacccaacgctgcccgagatgcgccgcgtgcggctgctggagatggcggacgcgatggatatgttctgccaagggttggtttgcgcattcacagttctccgcaagaattgattggctccaattcttggagtggtgaatccgttagcgaggtgccgccggcttccattcaggtcgaggtggcccggctccatgcaccgcgacgcaacgcggggaggcagacaaggtatagggcggcgcctacaatccatgccaacccgttccatgtgctcgccgaggcggcataaatcgccgtgacgatcagcggtccagtgatcgaagttaggctggtaagagccgcgagcgatccttgaagctgtccctgatggtcgtcatctacctgcctggacagcatggcctgcaacgcgggcatcccgatgccgccggaagcgagaagaatcataatggggaaggccatccagcctcgcgtcgcgaacgccagcaagacgtagcccagcgcgtcggccgccatgccggcgataatggcctgcttctcgccgaaacgtttggtggcgggaccagtgacgaaggcttgagcgagggcgtgcaagattccgaataccgcaagcgacaggccgatcatcgtcgcgctccagcgaaagcggtcctcgccgaaaatgacccagagcgctgccggcacctgtcctacgagttgcatgataaagaagacagtcataagtgcggcgacgatagtcatgccccgcgcccaccggaaggagctgactgggttgaaggctctcaagggcatcggtcgagatcccggtgcctaatgagtgagctaacttacattaattgcgttgcgctcactgcccgctttccagtcgggaaacctgtcgtgccagctgcattaatgaatcggccaacgcgcggggagaggcggtttgcgtattgggcgccagggtggtttttcttttcaccagtgagacgggcaacagctgattgcccttcaccgcctggccctgagagagttgcagcaagcggtccacgctggtttgccccagcaggcgaaaatcctgtttgatggtggttaacggcgggatataacatgagctgtcttcggtatcgtcgtatcccactaccgagatatccgcaccaacgcgcagcccggactcggtaatggcgcgcattgcgcccagcgccatctgatcgttggcaaccagcatcgcagtgggaacgatgccctcattcagcatttgcatggtttgttgaaaaccggacatggcactccagtcgccttcccgttccgctatcggctgaatttgattgcgagtgagatatttatgccagccagccagacgcagacgcgccgagacagaacttaatgggcccgctaacagcgcgatttgctggtgacccaatgcgaccagatgctccacgcccagtcgcgtaccgtcttcatgggagaaaataatactgttgatgggtgtc

SEQ ID NO: 135 - protein, 2146 aa, Serratia entomophila
MTAETSGHAAWASLMQARTAAWEAGKSATVDAMIATSQHEAEKANKKARELQGDSQAFFSHVAAYLQSLSSDLAKVSINMGQSTSSSTIRNEAEKASELQGDSQTFVSHVAAYLQSLPSDLAKVPINMWQNMDFVKTKLQAQTAVAGMKVHAHRLVRIAQHGHSTKTPAKDPEQVVTDSIIRSILWLWQQPAIKIQCASTALLSKVGELKKIEGILASYAVTDELGNEQERRNPPGEEDLDAQLREWVSASLKQENPENQRAVKVVTLERLLGGDIASARNLVERLGKAEEGIQNLLRRQQVAVLKMSVERLPAAVSSLKAVDKLLPDLAGDLTASIAALSNALQAAEYPARDFSEAKIQAGYAQLWATKVKESLSAASARLTERPLDEHSRGARLAKHWANLAKERSVGNYPPPDAQQVLASLKEQGLLAGTLSTGDPAGYLFATRLAGELENAGNGELRLPMSPEQYVALEKGLVEYIVKWGQRRISQGVTRIVIELSFEQALDTVSFNVSKLFRLPYKVLKASIKIPYNVNKVNNYTMPGHDKPYKAIYGLLGKKLKQLGFNLLTAPVPGVMKLVAGTGITAGAGVHNLRVENREKTFSAVYQHVVEGKQSEKIKMDSVKSMIFDSVLDTATTAAFKGGRRAWQSGRNKNDIEINEVTLSQAQQRQVAANNVDTAWGNAAANERKVEPVSHSSPLQQQTDVRPFSDKSDQDAAQPRVRKRAVADMAPPPPHQWHNNIPANTTLQSEHFDFDRDIRYQGFSDEKKKQTYLHGIQLVLLQIQNDGRFAQKIRNNAYLASIGVSNLVPVDIEGYKLKNTFLLPDSPSAKSGVIVRLDSENPYYYVGKGSDLLEDIKWAMPHDANEQKYEYMPDSDGNAHFYRLRNGFDIFNDIRMGNSSFEYFFNYNNPEPISITRLSSYLANTIEGDYKNGSSPPKNKLLISRAITGAHIPDPGVTATAAGYHIEFTWDNLTSAEYLRSFSRPFSTLSGEMQLVSSSINGETIQETELHVHQAEYIGSWVDATVGAITSFTPEGWVLNTTLSAADIAADLTEDKDPDPMAVAGLVVGCIPGGRIAAKVGKFTRIGGKVVKYGLMLGNKAVDLAIVGKSVKIAVDTGDPLAIYKALLISGIGTTNSYDMAKNMSSKLKISKKLEDSVQLDKPLQNLRGGSKRPEEGESTSQKRSQPDESPENSQEAVYSGPSGRARVTFDQTTEHHIMLNRFSRLVLARSFAEKRIQSFEHSSSKFKSSDEFKVDKSIPLDAQNASLNDMASKTDNLINQLEQFTGDKKESISANLKNIQLMIGDIMENRNNRNDNLNFHTYVLVGKNTTYDEISNYYGFAEFKFSINNGNLTLNNLIGHPYVVINKYPEFRDYLIRNGVITQPELEPYNIKNVARYLGSKAVSSEIGYYESIPATKVKILSFTGANPITQKLGNTLQSISDLFSKKRFSDEPNDAITQDELFTRQTDLYTYDEMINHLKTIVRTTFTPVKPIEEISSEKTDAAIKGIMTNGDAEIISENIIESKNSLDHDTSYFSHEVISAVDRAYEKVNSVKSLFERAESQPEIKSQLKSLINEATGLNDEVIIDIDKVDVSSISDMAYNRFKDNINTLHDYLSKQKSGGYTSFVLFKYRQFNPSKPDAFAMPYDSKKRIFLAMLPENQRHGGLVDTVTHEASHNSSYTLDHTYIGNARSNTGSFPSSFEPPTRDSRYFYENERVGKLSAKYALDLPENANITQNQLAQADILLRNSRLTKADTLLNAAEYNAYMIDVLSRVKINGSHIEFEENSSRSKRSVSGGNHKLDDIIILASMNATLPRREGGEFESSTFKKTLTEFINKGTTSSQVDPVYASYLPAFNTIVDSEGITLQQVKDLKSALPATGNDLRAQARYNYAVLQYLSGSAGIKLPIDTDVIRNSINDDLNIASCVDNCKKAASQRLELLKAVPEYLSGPEAIHAQIDTNLMINRIKNTLKHENYTYDLKVNERDYLLLQLEQKYIASSKPPKVGAQKWSADINKEINYLCDEIEEKKREVVCWENKKNESSRRLDLWSTATKYLSDPKGIKPPIDTDVILNNINDVLNHAGYVYNYKVREKDNLEKKLSRTPLTSQIEVNRLQTEIAKRYRLIDYWGKKADETLLMFILWRNVFG

SEQ ID NO: 136 - DNA, 12364 bp, Serratia entomophila
  source 1..12364: mol_type = other DNA
  CDS 933..7520: note = Afp18 N-terminal truncation M172
tggtcagagacatcaagaaataacgccggaacattagtgcaggcagcttccacagcaatggcatcctggtcatccagcggatagttaatgatcagcccactgacgcgttgcgcgagaagattgtgcaccgccgctttacaggcttcgacgccgcttcgttctaccatcgacaccaccacgctggcacccagttgatcggcgcgagatttaatcgccgcgacaatttgcgacggcgcgtgcagggccagactggaggtggcaacgccaatcagcaacgactgtttgcccgccagttgttgtgccacgcggttgggaatgtaattcagctccgccatcgccgcttccactttttcccgcgttttcgcagaaacgtggctggcctggttcaccacgcgggaaacggtctgataagagacaccggcatactctgcgacatcgtataacgttactggtttcacattcaccaccctgaattgactctcttccgggcgctatcatgccataccgcgaaaggttttgcgccattcgatggtgtccgggatctcgacgctctcccttatgcgactcctgcattaggaagcagcccagtagtaggttgaggccgttgagcaccgccgccgcaaggaatggtgcatgcaaggagatggcgcccaacagtcccccggccacggggcctgccaccatacccacgccgaaacaagcgctcatgagcccgaagtggcgagcccgatcttccccatcggtgatgtcggcgatataggcgccagcaaccgcacctgtggcgccggtgatgccggccacgatgcgtccggcgtagaggatcgagatctcgatcccgcgaaattaatacgactcactataggggaattgtgagcggataacaattcccctctagaaataattttgtttaactttaagaaggagatatacatatgcagacactgatccgcgttgtccataccctgcatgctatggatgactacagtaccccggaaaaacggcacgacatgctggtcgctgagcttaccggcgcgttctcctccagtgataaaaatacggtgatacaggcgctggggagaatgacggcagagacgtcaggtcatgccgcctgggcttcccttatgcaggcccggacagcggcgtgggaggccggtaagtcagccaccgtcgatgcgatgattgcgacttcacagcacgaagcagaaaaagccaataaaaaagcccgtgagcttcagggcgattcacaggctttctttagtcatgtcgccgcctatcttcagagcctctccagcgatttggcaaaagtgtcgattaacatggggcagagcacctcttcctcgactatacggaacgaagcagaaaaagccagtgagcttcagggcgattcacagactttcgttagtcatgtcgccgcctatcttcagagcctccctagcgatttggcaaaagtgccgattaacatgtggcagaatatggattttgttaagacaaaattacaagcgcaaactgcagttgcgggaatgaaagtgcatgcgcaccggcttgtccggatcgcacagcatggtcactccaccaaaacccctgcgaaggatcccgaacaggtcgttaccgattccatcatcagaagcattttatggctgtggcagcagccggccatcaaaatccagtgcgccagcactgcgttgttgtcaaaagtgggtgagctgaaaaaaattgaggggatactggcttcttacgccgtgacggatgagctgggaaacgaacaagaacgccgcaaccctccgggtgaggaggacctggatgcacagctcagggaatgggtgagcgccagccttaagcaggaaaaccccgaaaaccagcgggcggtaaaagtggtgacgctggagcggctgctgggcggtgatatcgccagtgcccgcaacctggtggaacgtctgggaaaagcggaagagggtattcagaatctgctcaggcggcagcaggttgctgtcctgaaaatgtcagttgagcgcttgcctgccgctgtttcctctctgaaggccgtggataaattactgccggatttggcaggtgacctcacggcgagtatcgccgccctgagcaacgcccttcaggcagccgaataccccgcccgcgactttagcgaagcaaaaatacaggccggctatgcacaattgtgggcgacaaaggtgaaggaaagtctgtcggcagcgtctgcacggctgaccgaaagaccgctggatgaacattcacggggcgcacgccttgccaaacattgggcaaacctcgccaaagaacggagcgtgggtaattatccgccgccggatgcacagcaggtacttgcctccctgaaggaacaggggctattagcggggaccctttcaaccggagatccggccgggtatcttttcgccacccggcttgccggtgagcttgaaaatgccggtaatggtgaattgcgattaccgatgagtccggagcaatatgttgctttagagaagggacttgttgagtatattgtaaaatggggacaacggcggatctcacaaggagtcacccgcattgttattgagttgtcctttgagcaggctctggatacggtatcgttcaacgtgtccaagctcttccggttaccttataaggtgctgaaggcctcgataaaaataccgtacaatgtcaataaggttaataattataccatgccgggccatgataagccctataaggcaatttatggcttgctgggaaaaaagcttaagcaacttggctttaatttactgacggcacccgtgcctggcgtgatgaaacttgtggctggcaccgggataaccgcaggtgcaggcgtgcataatttacgtgtcgaaaatagagagaaaacattcagcgcggtttatcaacacgtggtggaaggaaagcaaagtgaaaaaataaaaatggactccgtgaagtcgatgatttttgattcagtgctcgataccgccactacggccgcttttaaagggggacgaagagcctggcaatcaggaagaaataaaaacgacattgaaatcaatgaggtaacactttctcaagcacagcagcgccaagtggcagccaacaatgttgacactgcatgggggaatgctgctgcgaatgagaggaaggttgagccagtgagtcattcatcaccattacagcaacaaaccgatgttaggccgttctctgataagagtgaccaggatgctgctcaacctcgagtacgtaaacgggcagtggcggatatggctccccctccccctcatcaatggcataataacattcctgccaacacgacgctacagtcagaacattttgattttgatcgtgacatacgttatcagggcttctccgatgagaagaaaaaacaaacctatttacatggtattcaacttgtattgcttcagatacaaaatgatggacgctttgcacagaagatcaggaataatgcctaccttgccagtataggcgtttcgaacttagtacctgtcgatatagaaggatataaacttaaaaatacatttcttcttcctgatagcccaagtgctaaatctggagttattgttcgcttagattctgaaaatccttattactatgttggcaaagggagtgatcttttagaagacatcaaatgggccatgcctcatgatgctaatgaacagaagtatgaatatatgcctgattctgatgggaacgctcacttttaccgtctgcgcaacggttttgatatctttaatgatattaggatggggaattcaagtttcgaatatttctttaattataataatccggagccgataagcatcacgagactttcttcatatcttgcaaatactattgagggtgactataaaaacggatcgtcgcccccaaaaaacaaactattaatttccagagcgattactggtgctcatattcctgacccaggggtcactgcaaccgccgctggatatcatatcgaattcacctgggataatttgacttcagcagagtatctgaggtcattttcaaggcccttctctaccctcagtggagaaatgcagttagtgtctagctccattaatggagaaacgatacaggaaacagagctgcatgttcatcaggctgaatatataggaagctgggttgatgctactgtcggggccatcacatctttcacgccggagggatgggttctcaataccacactatcggcagcggacattgctgctgatttgacagaagataaggatcctgacccaatggcggttgctggcctggttgtaggatgcattcctggtggtcggattgcagctaaagtcggaaagttcacccgtattggcggtaaggttgttaaatacgggcttatgcttggcaataaagcggtcgacctggccatcgtagggaagagcgttaagatagctgtagacacgggtgatccactcgcaatttataaggcgcttctgatcagtggcataggtactacgaattcttacgatatggcaaagaatatgtcatcaaagctaaaaatcagcaagaaactggaagacagtgttcaattagataaaccactacaaaatctaaggggaggaagcaagcgtcctgaagagggtgaatcaacctcgcagaagcgttcacagccagatgagagtccagaaaatagtcaggaggctgtatattcaggcccctccggcagagctcgggtgacttttgaccagacgaccgaacatcatataatgcttaatagattttccagacttgtgttagctagaagttttgcagagaaaagaatacagtcttttgaacacagttcttcgaaatttaaaagcagtgacgagtttaaggtagataaaagcatacctttagatgcacaaaatgcttcacttaacgacatggcgagtaagacagataacttaattaatcagctagaacaatttacaggagataagaaagaatccatttccgccaatctgaaaaacatccagttaatgattggtgatataatggaaaatagaaacaataggaatgataatttaaatttccatacttatgtcttggttgggaaaaatacaacatatgacgaaataagtaactattatggttttgctgagtttaaattttcaataaataatggcaatcttactcttaacaaccttataggccacccttatgtcgtcattaataaataccctgaatttagagattatttgataagaaatggagtcatcacccaacccgagcttgaaccatataacataaagaatgtggctcggtatcttggctctaaagcggtgagcagtgagattggttattatgaatccattccagctactaaagtgaagattctctcgtttactggagccaatccgattacgcaaaaattaggtaatacacttcagagtatctctgatcttttttcaaaaaaacgattttcggacgaaccgaatgacgccatcactcaggatgaactatttacccgtcagactgatttatatacttatgatgagatgataaatcatctaaaaactatagtaagaacgacattcacacctgttaaaccgatagaagaaatatccagtgaaaaaactgatgcggccattaaaggaataatgaccaatggggatgcggaaataatttccgaaaacattatcgagagcaaaaatagtttagaccatgatacaagttatttttctcatgaagttatttcagctgttgatcgtgcatatgaaaaagtaaactccgtgaaatctctttttgaacgtgcagaatctcagcctgagattaaatctcaattaaaatcattaattaatgaagccactggattgaatgatgaggttatcattgatattgataaagtagatgtttctagcatatcagacatggcctataacaggtttaaagataatatcaatactctacatgactatctctctaagcaaaaatcagggggttatacatcctttgttttatttaaatatcgccagtttaatccatccaagcctgatgcctttgccatgccctatgacagtaagaaaagaatttttctggctatgttgccagaaaatcagcgccatggtggattagttgatacggtgacccatgaagcttcacataattcttcttacacattagatcatacttatatagggaacgcgcggagtaacaccggttcatttccttcctcatttgaacctccaactcgagattcgaggtatttttatgaaaatgaacgggtaggtaaactgagtgcaaagtatgctttagacttacccgaaaatgctaatatcacccaaaatcaactagcgcaggcagatattctgttaagaaacagcaggttgactaaagcagatacgcttctgaatgctgcagaatataatgcttatatgattgacgttctaagccgggtaaaaataaacggctcacatattgagtttgaagaaaactcatccagaagcaaacgctctgtttccggaggaaatcataaacttgatgatataattatactggcttcgatgaacgctacgcttcctaggagggaggggggggaatttgagtcatctaccttcaagaaaacattaacggaatttataaacaagggtacgaccagcagtcaggttgatcctgtttatgcatcctatctaccagcgtttaataccattgtagatagcgagggtattacattgcaacaggtgaaagacttaaaatcagctctgcccgcaaccggcaacgatctgagggctcaagccagatataactatgcggtgctacaatatttatctgggtcggcaggaattaagctaccaattgatactgatgtaatacgaaatagcattaatgatgatctgaatattgcaagttgcgtagataactgtaaaaaggcagcctcacaaaggcttgagttgttgaaggcggtgccagaatatttatctgggccggaagcaattcacgcacagattgatactaatttaatgataaatagaattaagaacactctgaaacatgaaaattacacatatgatcttaaagtaaatgaaagggattatcttttattacagttggaacaaaaatatatagcttcgagtaaacctcctaaagtcggagctcaaaaatggagtgctgacataaataaagaaattaattatttatgcgatgagatcgaagaaaaaaaacgcgaggtggtttgttgggagaataagaagaatgaatcatcacgaagacttgatttgtggagtacggcgacgaaatatttatctgacccgaaaggaattaaaccaccgattgatactgatgtaatactcaataacattaatgatgttcttaatcatgctggctacgtatataactataaagtgagagaaaaggataatcttgagaaaaagttgagtagaacccccctaacaagtcagatagaagtgaaccgtttacaaaccgagatcgcaaaaagatatagactaatagattattgggggaaaaaagcagatgaaacattactaatgtttatcttgtggaggaatgtgtttggttaaggtacccttgaggtgctgtttcagggaccaggaggtagtggatctgcttggagccatccacagttcgaaaaaggtggaggttctggcggtggatcaggtggaagtgcatggtctcaccctcagtttgagaaataaggatccggctgctaacaaagcccgaaaggaagctgagttggctgctgccaccgctgagcaataactagcataaccccttggggcctctaaacgggtcttgaggggttttttgctgaaaggaggaactatatccggatatcccgcaagaggcccggcagtaccggcataaccaagcctatgcctacagcatccagggtgacggtgccgaggatgacgatgagcgcattgttagatttcatacacggtgcctgactgcgttagcaatttaactgtgataaactaccgcattaaagcttatcgatgataagctgtcaaacatgagaattcttgaagacgaaagggcctcgtgatacgcctatttttataggttaatgtcatgataataatggtttcttagacgtcaggtggcacttttcggggaaatgtgcgcggaacccctatttgtttatttttctaaatacattcaaatatgtatccgctcatgagacaataaccctgataaatgcttcaataatattgaaaaaggaagagtatgagtattcaacatttccgtgtcgcccttattcccttttttgcggcattttgccttcctgtttttgctcacccagaaacgctggtgaaagtaaaagatgctgaagatcagttgggtgcacgagtgggttacatcgaactggatctcaacagcggtaagatccttgagagttttcgccccgaagaacgttttccaatgatgagcacttttaaagttctgctatgtggcgcggtattatcccgtgttgacgccgggcaagagcaactcggtcgccgcatacactattctcagaatgacttggttgagtactcaccagtcacagaaaagcatcttacggatggcatgacagtaagagaattatgcagtgctgccataaccatgagtgataacactgcggccaacttacttctgacaacgatcggaggaccgaaggagctaaccgcttttttgcacaacatgggggatcatgtaactcgccttgatcgttgggaaccggagctgaatgaagccataccaaacgacgagcgtgacaccacgatgcctgcagcaatggcaacaacgttgcgcaaactattaactggcgaactacttactctagcttcccggcaacaattaatagactggatggaggcggataaagttgcaggaccacttctgcgctcggcccttccggctggctggtttattgctgataaatctggagccggtgagcgtgggtctcgcggtatcattgcagcactggggccagatggtaagccctcccgtatcgtagttatctacacgacggggagtcaggcaactatggatgaacgaaatagacagatcgctgagataggtgcctcactgattaagcattggtaactgtcagaccaagtttactcatatatactttagattgatttaaaacttcatttttaatttaaaaggatctaggtgaagatcctttttgataatctcatgaccaaaatcccttaacgtgagttttcgttccactgagcgtcagaccccgtagaaaagatcaaaggatcttcttgagatcctttttttctgcgcgtaatctgctgcttgcaaacaaaaaaaccaccgctaccagcggtggtttgtttgccggatcaagagctaccaactctttttccgaaggtaactggcttcagcagagcgcagataccaaatactgtccttctagtgtagccgtagttaggccaccacttcaagaactctgtagcaccgcctacatacctcgctctgctaatcctgttaccagtggctgctgccagtggcgataagtcgtgtcttaccgggttggactcaagacgatagttaccggataaggcgcagcggtcgggctgaacggggggttcgtgcacacagcccagcttggagcgaacgacctacaccgaactgagatacctacagcgtgagctatgagaaagcgccacgcttcccgaagggagaaaggcggacaggtatccggtaagcggcagggtcggaacaggagagcgcacgagggagcttccagggggaaacgcctggtatctttatagtcctgtcgggtttcgccacctctgacttgagcgtcgatttttgtgatgctcgtcaggggggcggagcctatggaaaaacgccagcaacgcggcctttttacggttcctggccttttgctggccttttgctcacatgttctttcctgcgttatcccctgattctgtggataaccgtattaccgcctttgagtgagctgataccgctcgccgcagccgaacgaccgagcgcagcgagtcagtgagcgaggaagcggaagagcgcctgatgcggtattttctccttacgcatctgtgcggtatttcacaccgcatatatggtgcactctcagtacaatctgctctgatgccgcatagttaagccagtatacactccgctatcgctacgtgactgggtcatggctgcgccccgacacccgccaacacccgctgacgcgccctgacgggcttgtctgctcccggcatccgcttacagacaagctgtgaccgtctccgggagctgcatgtgtcagaggttttcaccgtcatcaccgaaacgcgcgaggcagctgcggtaaagctcatcagcgtggtcgtgaagcgattcacagatgtctgcctgttcatccgcgtccagctcgttgagtttctccagaagcgttaatgtctggcttctgataaagcgggccatgttaagggcggttttttcctgtttggtcactgatgcctccgtgtaagggggatttctgttcatgggggtaatgataccgatgaaacgagagaggatgctcacgatacgggttactgatgatgaacatgcccggttactggaacgttgtgagggtaaacaactggcggtatggatgcggcgggaccagagaaaaatcactcagggtcaatgccagcgcttcgttaatacagatgtaggtgttccacagggtagccagcagcatcctgcgatgcagatccggaacataatggtgcagggcgctgacttccgcgtttccagactttacgaaacacggaaaccgaagaccattcatgttgttgctcaggtcgcagacgttttgcagcagcagtcgcttcacgttcgctcgcgtatcggtgattcattctgctaaccagtaaggcaaccccgccagcctagccgggtcctcaacgacaggagcacgatcatgcgcacccgtggccaggacccaacgctgcccgagatgcgccgcgtgcggctgctggagatggcggacgcgatggatatgttctgccaagggttggtttgcgcattcacagttctccgcaagaattgattggctccaattcttggagtggtgaatccgttagcgaggtgccgccggcttccattcaggtcgaggtggcccggctccatgcaccgcgacgcaacgcggggaggcagacaaggtatagggcggcgcctacaatccatgccaacccgttccatgtgctcgccgaggcggcataaatcgccgtgacgatcagcggtccagtgatcgaagttaggctggtaagagccgcgagcgatccttgaagctgtccctgatggtcgtcatctacctgcctggacagcatggcctgcaacgcgggcatcccgatgccgccggaagcgagaagaatcataatggggaaggccatccagcctcgcgtcgcgaacgccagcaagacgtagcccagcgcgtcggccgccatgccggcgataatggcctgcttctcgccgaaacgtttggtggcgggaccagtgacgaaggcttgagcgagggcgtgcaagattccgaataccgcaagcgacaggccgatcatcgtcgcgctccagcgaaagcggtcctcgccgaaaatgacccagagcgctgccggcacctgtcctacgagttgcatgataaagaagacagtcataagtgcggcgacgatagtcatgccccgcgcccaccggaaggagctgactgggttgaaggctctcaagggcatcggtcgagatcccggtgcctaatgagtgagctaacttacattaattgcgttgcgctcactgcccgctttccagtcgggaaacctgtcgtgccagctgcattaatgaatcggccaacgcgcggggagaggcggtttgcgtattgggcgccagggtggtttttcttttcaccagtgagacgggcaacagctgattgcccttcaccgcctggccctgagagagttgcagcaagcggtccacgctggtttgccccagcaggcgaaaatcctgtttgatggtggttaacggcgggatataacatgagctgtcttcggtatcgtcgtatcccactaccgagatatccgcaccaacgcgcagcccggactcggtaatggcgcgcattgcgcccagcgccatctgatcgttggcaaccagcatcgcagtgggaacgatgccctcattcagcatttgcatggtttgttgaaaaccggacatggcactccagtcgccttcccgttccgctatcggctgaatttgattgcgagtgagatatttatgccagccagccagacgcagacgcgccgagacagaacttaatgggcccgctaacagcgcgatttgctggtgacccaatgcgaccagatgctccacgcccagtcgcgtaccgtcttcatgggagaaaataatactgttgatgggtgtc

SEQ ID NO: 137 - protein, 2195 aa, Serratia entomophila
MQTLIRVVHTLHAMDDYSTPEKRHDMLVAELTGAFSSSDKNTVIQALGRMTAETSGHAAWASLMQARTAAWEAGKSATVDAMIATSQHEAEKANKKARELQGDSQAFFSHVAAYLQSLSSDLAKVSINMGQSTSSSTIRNEAEKASELQGDSQTFVSHVAAYLQSLPSDLAKVPINMWQNMDFVKTKLQAQTAVAGMKVHAHRLVRIAQHGHSTKTPAKDPEQVVTDSIIRSILWLWQQPAIKIQCASTALLSKVGELKKIEGILASYAVTDELGNEQERRNPPGEEDLDAQLREWVSASLKQENPENQRAVKVVTLERLLGGDIASARNLVERLGKAEEGIQNLLRRQQVAVLKMSVERLPAAVSSLKAVDKLLPDLAGDLTASIAALSNALQAAEYPARDFSEAKIQAGYAQLWATKVKESLSAASARLTERPLDEHSRGARLAKHWANLAKERSVGNYPPPDAQQVLASLKEQGLLAGTLSTGDPAGYLFATRLAGELENAGNGELRLPMSPEQYVALEKGLVEYIVKWGQRRISQGVTRIVIELSFEQALDTVSFNVSKLFRLPYKVLKASIKIPYNVNKVNNYTMPGHDKPYKAIYGLLGKKLKQLGFNLLTAPVPGVMKLVAGTGITAGAGVHNLRVENREKTFSAVYQHVVEGKQSEKIKMDSVKSMIFDSVLDTATTAAFKGGRRAWQSGRNKNDIEINEVTLSQAQQRQVAANNVDTAWGNAAANERKVEPVSHSSPLQQQTDVRPFSDKSDQDAAQPRVRKRAVADMAPPPPHQWHNNIPANTTLQSEHFDFDRDIRYQGFSDEKKKQTYLHGIQLVLLQIQNDGRFAQKIRNNAYLASIGVSNLVPVDIEGYKLKNTFLLPDSPSAKSGVIVRLDSENPYYYVGKGSDLLEDIKWAMPHDANEQKYEYMPDSDGNAHFYRLRNGFDIFNDIRMGNSSFEYFFNYNNPEPISITRLSSYLANTIEGDYKNGSSPPKNKLLISRAITGAHIPDPGVTATAAGYHIEFTWDNLTSAEYLRSFSRPFSTLSGEMQLVSSSINGETIQETELHVHQAEYIGSWVDATVGAITSFTPEGWVLNTTLSAADIAADLTEDKDPDPMAVAGLVVGCIPGGRIAAKVGKFTRIGGKVVKYGLMLGNKAVDLAIVGKSVKIAVDTGDPLAIYKALLISGIGTTNSYDMAKNMSSKLKISKKLEDSVQLDKPLQNLRGGSKRPEEGESTSQKRSQPDESPENSQEAVYSGPSGRARVTFDQTTEHHIMLNRFSRLVLARSFAEKRIQSFEHSSSKFKSSDEFKVDKSIPLDAQNASLNDMASKTDNLINQLEQFTGDKKESISANLKNIQLMIGDIMENRNNRNDNLNFHTYVLVGKNTTYDEISNYYGFAEFKFSINNGNLTLNNLIGHPYVVINKYPEFRDYLIRNGVITQPELEPYNIKNVARYLGSKAVSSEIGYYESIPATKVKILSFTGANPITQKLGNTLQSISDLFSKKRFSDEPNDAITQDELFTRQTDLYTYDEMINHLKTIVRTTFTPVKPIEEISSEKTDAAIKGIMTNGDAEIISENIIESKNSLDHDTSYFSHEVISAVDRAYEKVNSVKSLFERAESQPEIKSQLKSLINEATGLNDEVIIDIDKVDVSSISDMAYNRFKDNINTLHDYLSKQKSGGYTSFVLFKYRQFNPSKPDAFAMPYDSKKRIFLAMLPENQRHGGLVDTVTHEASHNSSYTLDHTYIGNARSNTGSFPSSFEPPTRDSRYFYENERVGKLSAKYALDLPENANITQNQLAQADILLRNSRLTKADTLLNAAEYNAYMIDVLSRVKINGSHIEFEENSSRSKRSVSGGNHKLDDIIILASMNATLPRREGGEFESSTFKKTLTEFINKGTTSSQVDPVYASYLPAFNTIVDSEGITLQQVKDLKSALPATGNDLRAQARYNYAVLQYLSGSAGIKLPIDTDVIRNSINDDLNIASCVDNCKKAASQRLELLKAVPEYLSGPEAIHAQIDTNLMINRIKNTLKHENYTYDLKVNERDYLLLQLEQKYIASSKPPKVGAQKWSADINKEINYLCDEIEEKKREVVCWENKKNESSRRLDLWSTATKYLSDPKGIKPPIDTDVILNNINDVLNHAGYVYNYKVREKDNLEKKLSRTPLTSQIEVNRLQTEIAKRYRLIDYWGKKADETLLMFILWRNVFG

SEQ ID NO: 138 - DNA, 12595 bp, Serratia entomophila
  source 1..12595: mol_type = other DNA
  CDS 933..7751: note = Afp18 N-terminal truncation A96 and insertion of a start Methionine
tggtcagagacatcaagaaataacgccggaacattagtgcaggcagcttccacagcaatggcatcctggtcatccagcggatagttaatgatcagcccactgacgcgttgcgcgagaagattgtgcaccgccgctttacaggcttcgacgccgcttcgttctaccatcgacaccaccacgctggcacccagttgatcggcgcgagatttaatcgccgcgacaatttgcgacggcgcgtgcagggccagactggaggtggcaacgccaatcagcaacgactgtttgcccgccagttgttgtgccacgcggttgggaatgtaattcagctccgccatcgccgcttccactttttcccgcgttttcgcagaaacgtggctggcctggttcaccacgcgggaaacggtctgataagagacaccggcatactctgcgacatcgtataacgttactggtttcacattcaccaccctgaattgactctcttccgggcgctatcatgccataccgcgaaaggttttgcgccattcgatggtgtccgggatctcgacgctctcccttatgcgactcctgcattaggaagcagcccagtagtaggttgaggccgttgagcaccgccgccgcaaggaatggtgcatgcaaggagatggcgcccaacagtcccccggccacggggcctgccaccatacccacgccgaaacaagcgctcatgagcccgaagtggcgagcccgatcttccccatcggtgatgtcggcgatataggcgccagcaaccgcacctgtggcgccggtgatgccggccacgatgcgtccggcgtagaggatcgagatctcgatcccgcgaaattaatacgactcactataggggaattgtgagcggataacaattcccctctagaaataattttgtttaactttaagaaggagatatacatatggccaaatcccgccagtacgttcaggcaagcgttggggggccgctgggttctcggtggctgctggaacagataggcaaaatagagcggctgacggacaagttttctgacgaagtaataaaacgctgggttaagcatgagctgccacgaaaaaacgtaggggaagccgcggggaccgagttggggagccggcgtagggctcagtcgctggccagacggttggagtcaaccatgcagacactgatccgcgttgtccataccctgcatgctatggatgactacagtaccccggaaaaacggcacgacatgctggtcgctgagcttaccggcgcgttctcctccagtgataaaaatacggtgatacaggcgctggggagaatgacggcagagacgtcaggtcatgccgcctgggcttcccttatgcaggcccggacagcggcgtgggaggccggtaagtcagccaccgtcgatgcgatgattgcgacttcacagcacgaagcagaaaaagccaataaaaaagcccgtgagcttcagggcgattcacaggctttctttagtcatgtcgccgcctatcttcagagcctctccagcgatttggcaaaagtgtcgattaacatggggcagagcacctcttcctcgactatacggaacgaagcagaaaaagccagtgagcttcagggcgattcacagactttcgttagtcatgtcgccgcctatcttcagagcctccctagcgatttggcaaaagtgccgattaacatgtggcagaatatggattttgttaagacaaaattacaagcgcaaactgcagttgcgggaatgaaagtgcatgcgcaccggcttgtccggatcgcacagcatggtcactccaccaaaacccctgcgaaggatcccgaacaggtcgttaccgattccatcatcagaagcattttatggctgtggcagcagccggccatcaaaatccagtgcgccagcactgcgttgttgtcaaaagtgggtgagctgaaaaaaattgaggggatactggcttcttacgccgtgacggatgagctgggaaacgaacaagaacgccgcaaccctccgggtgaggaggacctggatgcacagctcagggaatgggtgagcgccagccttaagcaggaaaaccccgaaaaccagcgggcggtaaaagtggtgacgctggagcggctgctgggcggtgatatcgccagtgcccgcaacctggtggaacgtctgggaaaagcggaagagggtattcagaatctgctcaggcggcagcaggttgctgtcctgaaaatgtcagttgagcgcttgcctgccgctgtttcctctctgaaggccgtggataaattactgccggatttggcaggtgacctcacggcgagtatcgccgccctgagcaacgcccttcaggcagccgaataccccgcccgcgactttagcgaagcaaaaatacaggccggctatgcacaattgtgggcgacaaaggtgaaggaaagtctgtcggcagcgtctgcacggctgaccgaaagaccgctggatgaacattcacggggcgcacgccttgccaaacattgggcaaacctcgccaaagaacggagcgtgggtaattatccgccgccggatgcacagcaggtacttgcctccctgaaggaacaggggctattagcggggaccctttcaaccggagatccggccgggtatcttttcgccacccggcttgccggtgagcttgaaaatgccggtaatggtgaattgcgattaccgatgagtccggagcaatatgttgctttagagaagggacttgttgagtatattgtaaaatggggacaacggcggatctcacaaggagtcacccgcattgttattgagttgtcctttgagcaggctctggatacggtatcgttcaacgtgtccaagctcttccggttaccttataaggtgctgaaggcctcgataaaaataccgtacaatgtcaataaggttaataattataccatgccgggccatgataagccctataaggcaatttatggcttgctgggaaaaaagcttaagcaacttggctttaatttactgacggcacccgtgcctggcgtgatgaaacttgtggctggcaccgggataaccgcaggtgcaggcgtgcataatttacgtgtcgaaaatagagagaaaacattcagcgcggtttatcaacacgtggtggaaggaaagcaaagtgaaaaaataaaaatggactccgtgaagtcgatgatttttgattcagtgctcgataccgccactacggccgcttttaaagggggacgaagagcctggcaatcaggaagaaataaaaacgacattgaaatcaatgaggtaacactttctcaagcacagcagcgccaagtggcagccaacaatgttgacactgcatgggggaatgctgctgcgaatgagaggaaggttgagccagtgagtcattcatcaccattacagcaacaaaccgatgttaggccgttctctgataagagtgaccaggatgctgctcaacctcgagtacgtaaacgggcagtggcggatatggctccccctccccctcatcaatggcataataacattcctgccaacacgacgctacagtcagaacattttgattttgatcgtgacatacgttatcagggcttctccgatgagaagaaaaaacaaacctatttacatggtattcaacttgtattgcttcagatacaaaatgatggacgctttgcacagaagatcaggaataatgcctaccttgccagtataggcgtttcgaacttagtacctgtcgatatagaaggatataaacttaaaaatacatttcttcttcctgatagcccaagtgctaaatctggagttattgttcgcttagattctgaaaatccttattactatgttggcaaagggagtgatcttttagaagacatcaaatgggccatgcctcatgatgctaatgaacagaagtatgaatatatgcctgattctgatgggaacgctcacttttaccgtctgcgcaacggttttgatatctttaatgatattaggatggggaattcaagtttcgaatatttctttaattataataatccggagccgataagcatcacgagactttcttcatatcttgcaaatactattgagggtgactataaaaacggatcgtcgcccccaaaaaacaaactattaatttccagagcgattactggtgctcatattcctgacccaggggtcactgcaaccgccgctggatatcatatcgaattcacctgggataatttgacttcagcagagtatctgaggtcattttcaaggcccttctctaccctcagtggagaaatgcagttagtgtctagctccattaatggagaaacgatacaggaaacagagctgcatgttcatcaggctgaatatataggaagctgggttgatgctactgtcggggccatcacatctttcacgccggagggatgggttctcaataccacactatcggcagcggacattgctgctgatttgacagaagataaggatcctgacccaatggcggttgctggcctggttgtaggatgcattcctggtggtcggattgcagctaaagtcggaaagttcacccgtattggcggtaaggttgttaaatacgggcttatgcttggcaataaagcggtcgacctggccatcgtagggaagagcgttaagatagctgtagacacgggtgatccactcgcaatttataaggcgcttctgatcagtggcataggtactacgaattcttacgatatggcaaagaatatgtcatcaaagctaaaaatcagcaagaaactggaagacagtgttcaattagataaaccactacaaaatctaaggggaggaagcaagcgtcctgaagagggtgaatcaacctcgcagaagcgttcacagccagatgagagtccagaaaatagtcaggaggctgtatattcaggcccctccggcagagctcgggtgacttttgaccagacgaccgaacatcatataatgcttaatagattttccagacttgtgttagctagaagttttgcagagaaaagaatacagtcttttgaacacagttcttcgaaatttaaaagcagtgacgagtttaaggtagataaaagcatacctttagatgcacaaaatgcttcacttaacgacatggcgagtaagacagataacttaattaatcagctagaacaatttacaggagataagaaagaatccatttccgccaatctgaaaaacatccagttaatgattggtgatataatggaaaatagaaacaataggaatgataatttaaatttccatacttatgtcttggttgggaaaaatacaacatatgacgaaataagtaactattatggttttgctgagtttaaattttcaataaataatggcaatcttactcttaacaaccttataggccacccttatgtcgtcattaataaataccctgaatttagagattatttgataagaaatggagtcatcacccaacccgagcttgaaccatataacataaagaatgtggctcggtatcttggctctaaagcggtgagcagtgagattggttattatgaatccattccagctactaaagtgaagattctctcgtttactggagccaatccgattacgcaaaaattaggtaatacacttcagagtatctctgatcttttttcaaaaaaacgattttcggacgaaccgaatgacgccatcactcaggatgaactatttacccgtcagactgatttatatacttatgatgagatgataaatcatctaaaaactatagtaagaacgacattcacacctgttaaaccgatagaagaaatatccagtgaaaaaactgatgcggccattaaaggaataatgaccaatggggatgcggaaataatttccgaaaacattatcgagagcaaaaatagtttagaccatgatacaagttatttttctcatgaagttatttcagctgttgatcgtgcatatgaaaaagtaaactccgtgaaatctctttttgaacgtgcagaatctcagcctgagattaaatctcaattaaaatcattaattaatgaagccactggattgaatgatgaggttatcattgatattgataaagtagatgtttctagcatatcagacatggcctataacaggtttaaagataatatcaatactctacatgactatctctctaagcaaaaatcagggggttatacatcctttgttttatttaaatatcgccagtttaatccatccaagcctgatgcctttgccatgccctatgacagtaagaaaagaatttttctggctatgttgccagaaaatcagcgccatggtggattagttgatacggtgacccatgaagcttcacataattcttcttacacattagatcatacttatatagggaacgcgcggagtaacaccggttcatttccttcctcatttgaacctccaactcgagattcgaggtatttttatgaaaatgaacgggtaggtaaactgagtgcaaagtatgctttagacttacccgaaaatgctaatatcacccaaaatcaactagcgcaggcagatattctgttaagaaacagcaggttgactaaagcagatacgcttctgaatgctgcagaatataatgcttatatgattgacgttctaagccgggtaaaaataaacggctcacatattgagtttgaagaaaactcatccagaagcaaacgctctgtttccggaggaaatcataaacttgatgatataattatactggcttcgatgaacgctacgcttcctaggagggaggggggggaatttgagtcatctaccttcaagaaaacattaacggaatttataaacaagggtacgaccagcagtcaggttgatcctgtttatgcatcctatctaccagcgtttaataccattgtagatagcgagggtattacattgcaacaggtgaaagacttaaaatcagctctgcccgcaaccggcaacgatctgagggctcaagccagatataactatgcggtgctacaatatttatctgggtcggcaggaattaagctaccaattgatactgatgtaatacgaaatagcattaatgatgatctgaatattgcaagttgcgtagataactgtaaaaaggcagcctcacaaaggcttgagttgttgaaggcggtgccagaatatttatctgggccggaagcaattcacgcacagattgatactaatttaatgataaatagaattaagaacactctgaaacatgaaaattacacatatgatcttaaagtaaatgaaagggattatcttttattacagttggaacaaaaatatatagcttcgagtaaacctcctaaagtcggagctcaaaaatggagtgctgacataaataaagaaattaattatttatgcgatgagatcgaagaaaaaaaacgcgaggtggtttgttgggagaataagaagaatgaatcatcacgaagacttgatttgtggagtacggcgacgaaatatttatctgacccgaaaggaattaaaccaccgattgatactgatgtaatactcaataacattaatgatgttcttaatcatgctggctacgtatataactataaagtgagagaaaaggataatcttgagaaaaagttgagtagaacccccctaacaagtcagatagaagtgaaccgtttacaaaccgagatcgcaaaaagatatagactaatagattattgggggaaaaaagcagatgaaacattactaatgtttatcttgtggaggaatgtgtttggttaaggtacccttgaggtgctgtttcagggaccaggaggtagtggatctgcttggagccatccacagttcgaaaaaggtggaggttctggcggtggatcaggtggaagtgcatggtctcaccctcagtttgagaaataaggatccggctgctaacaaagcccgaaaggaagctgagttggctgctgccaccgctgagcaataactagcataaccccttggggcctctaaacgggtcttgaggggttttttgctgaaaggaggaactatatccggatatcccgcaagaggcccggcagtaccggcataaccaagcctatgcctacagcatccagggtgacggtgccgaggatgacgatgagcgcattgttagatttcatacacggtgcctgactgcgttagcaatttaactgtgataaactaccgcattaaagcttatcgatgataagctgtcaaacatgagaattcttgaagacgaaagggcctcgtgatacgcctatttttataggttaatgtcatgataataatggtttcttagacgtcaggtggcacttttcggggaaatgtgcgcggaacccctatttgtttatttttctaaatacattcaaatatgtatccgctcatgagacaataaccctgataaatgcttcaataatattgaaaaaggaagagtatgagtattcaacatttccgtgtcgcccttattcccttttttgcggcattttgccttcctgtttttgctcacccagaaacgctggtgaaagtaaaagatgctgaagatcagttgggtgcacgagtgggttacatcgaactggatctcaacagcggtaagatccttgagagttttcgccccgaagaacgttttccaatgatgagcacttttaaagttctgctatgtggcgcggtattatcccgtgttgacgccgggcaagagcaactcggtcgccgcatacactattctcagaatgacttggttgagtactcaccagtcacagaaaagcatcttacggatggcatgacagtaagagaattatgcagtgctgccataaccatgagtgataacactgcggccaacttacttctgacaacgatcggaggaccgaaggagctaaccgcttttttgcacaacatgggggatcatgtaactcgccttgatcgttgggaaccggagctgaatgaagccataccaaacgacgagcgtgacaccacgatgcctgcagcaatggcaacaacgttgcgcaaactattaactggcgaactacttactctagcttcccggcaacaattaatagactggatggaggcggataaagttgcaggaccacttctgcgctcggcccttccggctggctggtttattgctgataaatctggagccggtgagcgtgggtctcgcggtatcattgcagcactggggccagatggtaagccctcccgtatcgtagttatctacacgacggggagtcaggcaactatggatgaacgaaatagacagatcgctgagataggtgcctcactgattaagcattggtaactgtcagaccaagtttactcatatatactttagattgatttaaaacttcatttttaatttaaaaggatctaggtgaagatcctttttgataatctcatgaccaaaatcccttaacgtgagttttcgttccactgagcgtcagaccccgtagaaaagatcaaaggatcttcttgagatcctttttttctgcgcgtaatctgctgcttgcaaacaaaaaaaccaccgctaccagcggtggtttgtttgccggatcaagagctaccaactctttttccgaaggtaactggcttcagcagagcgcagataccaaatactgtccttctagtgtagccgtagttaggccaccacttcaagaactctgtagcaccgcctacatacctcgctctgctaatcctgttaccagtggctgctgccagtggcgataagtcgtgtcttaccgggttggactcaagacgatagttaccggataaggcgcagcggtcgggctgaacggggggttcgtgcacacagcccagcttggagcgaacgacctacaccgaactgagatacctacagcgtgagctatgagaaagcgccacgcttcccgaagggagaaaggcggacaggtatccggtaagcggcagggtcggaacaggagagcgcacgagggagcttccagggggaaacgcctggtatctttatagtcctgtcgggtttcgccacctctgacttgagcgtcgatttttgtgatgctcgtcaggggggcggagcctatggaaaaacgccagcaacgcggcctttttacggttcctggccttttgctggccttttgctcacatgttctttcctgcgttatcccctgattctgtggataaccgtattaccgcctttgagtgagctgataccgctcgccgcagccgaacgaccgagcgcagcgagtcagtgagcgaggaagcggaagagcgcctgatgcggtattttctccttacgcatctgtgcggtatttcacaccgcatatatggtgcactctcagtacaatctgctctgatgccgcatagttaagccagtatacactccgctatcgctacgtgactgggtcatggctgcgccccgacacccgccaacacccgctgacgcgccctgacgggcttgtctgctcccggcatccgcttacagacaagctgtgaccgtctccgggagctgcatgtgtcagaggttttcaccgtcatcaccgaaacgcgcgaggcagctgcggtaaagctcatcagcgtggtcgtgaagcgattcacagatgtctgcctgttcatccgcgtccagctcgttgagtttctccagaagcgttaatgtctggcttctgataaagcgggccatgttaagggcggttttttcctgtttggtcactgatgcctccgtgtaagggggatttctgttcatgggggtaatgataccgatgaaacgagagaggatgctcacgatacgggttactgatgatgaacatgcccggttactggaacgttgtgagggtaaacaactggcggtatggatgcggcgggaccagagaaaaatcactcagggtcaatgccagcgcttcgttaatacagatgtaggtgttccacagggtagccagcagcatcctgcgatgcagatccggaacataatggtgcagggcgctgacttccgcgtttccagactttacgaaacacggaaaccgaagaccattcatgttgttgctcaggtcgcagacgttttgcagcagcagtcgcttcacgttcgctcgcgtatcggtgattcattctgctaaccagtaaggcaaccccgccagcctagccgggtcctcaacgacaggagcacgatcatgcgcacccgtggccaggacccaacgctgcccgagatgcgccgcgtgcggctgctggagatggcggacgcgatggatatgttctgccaagggttggtttgcgcattcacagttctccgcaagaattgattggctccaattcttggagtggtgaatccgttagcgaggtgccgccggcttccattcaggtcgaggtggcccggctccatgcaccgcgacgcaacgcggggaggcagacaaggtatagggcggcgcctacaatccatgccaacccgttccatgtgctcgccgaggcggcataaatcgccgtgacgatcagcggtccagtgatcgaagttaggctggtaagagccgcgagcgatccttgaagctgtccctgatggtcgtcatctacctgcctggacagcatggcctgcaacgcgggcatcccgatgccgccggaagcgagaagaatcataatggggaaggccatccagcctcgcgtcgcgaacgccagcaagacgtagcccagcgcgtcggccgccatgccggcgataatggcctgcttctcgccgaaacgtttggtggcgggaccagtgacgaaggcttgagcgagggcgtgcaagattccgaataccgcaagcgacaggccgatcatcgtcgcgctccagcgaaagcggtcctcgccgaaaatgacccagagcgctgccggcacctgtcctacgagttgcatgataaagaagacagtcataagtgcggcgacgatagtcatgccccgcgcccaccggaaggagctgactgggttgaaggctctcaagggcatcggtcgagatcccggtgcctaatgagtgagctaacttacattaattgcgttgcgctcactgcccgctttccagtcgggaaacctgtcgtgccagctgcattaatgaatcggccaacgcgcggggagaggcggtttgcgtattgggcgccagggtggtttttcttttcaccagtgagacgggcaacagctgattgcccttcaccgcctggccctgagagagttgcagcaagcggtccacgctggtttgccccagcaggcgaaaatcctgtttgatggtggttaacggcgggatataacatgagctgtcttcggtatcgtcgtatcccactaccgagatatccgcaccaacgcgcagcccggactcggtaatggcgcgcattgcgcccagcgccatctgatcgttggcaaccagcatcgcagtgggaacgatgccctcattcagcatttgcatggtttgttgaaaaccggacatggcactccagtcgccttcccgttccgctatcggctgaatttgattgcgagtgagatatttatgccagccagccagacgcagacgcgccgagacagaacttaatgggcccgctaacagcgcgatttgctggtgacccaatgcgaccagatgctccacgcccagtcgcgtaccgtcttcatgggagaaaataatactgttgatgggtgtc

SEQ ID NO: 139 - protein, 2272 aa, Serratia entomophila
MAKSRQYVQASVGGPLGSRWLLEQIGKIERLTDKFSDEVIKRWVKHELPRKNVGEAAGTELGSRRRAQSLARRLESTMQTLIRVVHTLHAMDDYSTPEKRHDMLVAELTGAFSSSDKNTVIQALGRMTAETSGHAAWASLMQARTAAWEAGKSATVDAMIATSQHEAEKANKKARELQGDSQAFFSHVAAYLQSLSSDLAKVSINMGQSTSSSTIRNEAEKASELQGDSQTFVSHVAAYLQSLPSDLAKVPINMWQNMDFVKTKLQAQTAVAGMKVHAHRLVRIAQHGHSTKTPAKDPEQVVTDSIIRSILWLWQQPAIKIQCASTALLSKVGELKKIEGILASYAVTDELGNEQERRNPPGEEDLDAQLREWVSASLKQENPENQRAVKVVTLERLLGGDIASARNLVERLGKAEEGIQNLLRRQQVAVLKMSVERLPAAVSSLKAVDKLLPDLAGDLTASIAALSNALQAAEYPARDFSEAKIQAGYAQLWATKVKESLSAASARLTERPLDEHSRGARLAKHWANLAKERSVGNYPPPDAQQVLASLKEQGLLAGTLSTGDPAGYLFATRLAGELENAGNGELRLPMSPEQYVALEKGLVEYIVKWGQRRISQGVTRIVIELSFEQALDTVSFNVSKLFRLPYKVLKASIKIPYNVNKVNNYTMPGHDKPYKAIYGLLGKKLKQLGFNLLTAPVPGVMKLVAGTGITAGAGVHNLRVENREKTFSAVYQHVVEGKQSEKIKMDSVKSMIFDSVLDTATTAAFKGGRRAWQSGRNKNDIEINEVTLSQAQQRQVAANNVDTAWGNAAANERKVEPVSHSSPLQQQTDVRPFSDKSDQDAAQPRVRKRAVADMAPPPPHQWHNNIPANTTLQSEHFDFDRDIRYQGFSDEKKKQTYLHGIQLVLLQIQNDGRFAQKIRNNAYLASIGVSNLVPVDIEGYKLKNTFLLPDSPSAKSGVIVRLDSENPYYYVGKGSDLLEDIKWAMPHDANEQKYEYMPDSDGNAHFYRLRNGFDIFNDIRMGNSSFEYFFNYNNPEPISITRLSSYLANTIEGDYKNGSSPPKNKLLISRAITGAHIPDPGVTATAAGYHIEFTWDNLTSAEYLRSFSRPFSTLSGEMQLVSSSINGETIQETELHVHQAEYIGSWVDATVGAITSFTPEGWVLNTTLSAADIAADLTEDKDPDPMAVAGLVVGCIPGGRIAAKVGKFTRIGGKVVKYGLMLGNKAVDLAIVGKSVKIAVDTGDPLAIYKALLISGIGTTNSYDMAKNMSSKLKISKKLEDSVQLDKPLQNLRGGSKRPEEGESTSQKRSQPDESPENSQEAVYSGPSGRARVTFDQTTEHHIMLNRFSRLVLARSFAEKRIQSFEHSSSKFKSSDEFKVDKSIPLDAQNASLNDMASKTDNLINQLEQFTGDKKESISANLKNIQLMIGDIMENRNNRNDNLNFHTYVLVGKNTTYDEISNYYGFAEFKFSINNGNLTLNNLIGHPYVVINKYPEFRDYLIRNGVITQPELEPYNIKNVARYLGSKAVSSEIGYYESIPATKVKILSFTGANPITQKLGNTLQSISDLFSKKRFSDEPNDAITQDELFTRQTDLYTYDEMINHLKTIVRTTFTPVKPIEEISSEKTDAAIKGIMTNGDAEIISENIIESKNSLDHDTSYFSHEVISAVDRAYEKVNSVKSLFERAESQPEIKSQLKSLINEATGLNDEVIIDIDKVDVSSISDMAYNRFKDNINTLHDYLSKQKSGGYTSFVLFKYRQFNPSKPDAFAMPYDSKKRIFLAMLPENQRHGGLVDTVTHEASHNSSYTLDHTYIGNARSNTGSFPSSFEPPTRDSRYFYENERVGKLSAKYALDLPENANITQNQLAQADILLRNSRLTKADTLLNAAEYNAYMIDVLSRVKINGSHIEFEENSSRSKRSVSGGNHKLDDIIILASMNATLPRREGGEFESSTFKKTLTEFINKGTTSSQVDPVYASYLPAFNTIVDSEGITLQQVKDLKSALPATGNDLRAQARYNYAVLQYLSGSAGIKLPIDTDVIRNSINDDLNIASCVDNCKKAASQRLELLKAVPEYLSGPEAIHAQIDTNLMINRIKNTLKHENYTYDLKVNERDYLLLQLEQKYIASSKPPKVGAQKWSADINKEINYLCDEIEEKKREVVCWENKKNESSRRLDLWSTATKYLSDPKGIKPPIDTDVILNNINDVLNHAGYVYNYKVREKDNLEKKLSRTPLTSQIEVNRLQTEIAKRYRLIDYWGKKADETLLMFILWRNVFG

SEQ ID NO: 140 - DNA, 12790 bp, Serratia entomophila
  source 1..12790: mol_type = other DNA
  CDS 933..7946: note = Afp18 N-terminal truncation S30 and addition of start Methionine
tggtcagagacatcaagaaataacgccggaacattagtgcaggcagcttccacagcaatggcatcctggtcatccagcggatagttaatgatcagcccactgacgcgttgcgcgagaagattgtgcaccgccgctttacaggcttcgacgccgcttcgttctaccatcgacaccaccacgctggcacccagttgatcggcgcgagatttaatcgccgcgacaatttgcgacggcgcgtgcagggccagactggaggtggcaacgccaatcagcaacgactgtttgcccgccagttgttgtgccacgcggttgggaatgtaattcagctccgccatcgccgcttccactttttcccgcgttttcgcagaaacgtggctggcctggttcaccacgcgggaaacggtctgataagagacaccggcatactctgcgacatcgtataacgttactggtttcacattcaccaccctgaattgactctcttccgggcgctatcatgccataccgcgaaaggttttgcgccattcgatggtgtccgggatctcgacgctctcccttatgcgactcctgcattaggaagcagcccagtagtaggttgaggccgttgagcaccgccgccgcaaggaatggtgcatgcaaggagatggcgcccaacagtcccccggccacggggcctgccaccatacccacgccgaaacaagcgctcatgagcccgaagtggcgagcccgatcttccccatcggtgatgtcggcgatataggcgccagcaaccgcacctgtggcgccggtgatgccggccacgatgcgtccggcgtagaggatcgagatctcgatcccgcgaaattaatacgactcactataggggaattgtgagcggataacaattcccctctagaaataattttgtttaactttaagaaggagatatacatatgcagggcggcgtgggtgtttcaccgcctgatgaggggggagacttgtcggccggaagtaacaatgaccatttattcgcttttattcgtgaaacacacttggaagaagcccaggaattcaggctaaaagggtataacagccaggtgcccgaggttgacgagggattactgacgcagctgcgtgacgacctggcggcggccaaatcccgccagtacgttcaggcaagcgttggggggccgctgggttctcggtggctgctggaacagataggcaaaatagagcggctgacggacaagttttctgacgaagtaataaaacgctgggttaagcatgagctgccacgaaaaaacgtaggggaagccgcggggaccgagttggggagccggcgtagggctcagtcgctggccagacggttggagtcaaccatgcagacactgatccgcgttgtccataccctgcatgctatggatgactacagtaccccggaaaaacggcacgacatgctggtcgctgagcttaccggcgcgttctcctccagtgataaaaatacggtgatacaggcgctggggagaatgacggcagagacgtcaggtcatgccgcctgggcttcccttatgcaggcccggacagcggcgtgggaggccggtaagtcagccaccgtcgatgcgatgattgcgacttcacagcacgaagcagaaaaagccaataaaaaagcccgtgagcttcagggcgattcacaggctttctttagtcatgtcgccgcctatcttcagagcctctccagcgatttggcaaaagtgtcgattaacatggggcagagcacctcttcctcgactatacggaacgaagcagaaaaagccagtgagcttcagggcgattcacagactttcgttagtcatgtcgccgcctatcttcagagcctccctagcgatttggcaaaagtgccgattaacatgtggcagaatatggattttgttaagacaaaattacaagcgcaaactgcagttgcgggaatgaaagtgcatgcgcaccggcttgtccggatcgcacagcatggtcactccaccaaaacccctgcgaaggatcccgaacaggtcgttaccgattccatcatcagaagcattttatggctgtggcagcagccggccatcaaaatccagtgcgccagcactgcgttgttgtcaaaagtgggtgagctgaaaaaaattgaggggatactggcttcttacgccgtgacggatgagctgggaaacgaacaagaacgccgcaaccctccgggtgaggaggacctggatgcacagctcagggaatgggtgagcgccagccttaagcaggaaaaccccgaaaaccagcgggcggtaaaagtggtgacgctggagcggctgctgggcggtgatatcgccagtgcccgcaacctggtggaacgtctgggaaaagcggaagagggtattcagaatctgctcaggcggcagcaggttgctgtcctgaaaatgtcagttgagcgcttgcctgccgctgtttcctctctgaaggccgtggataaattactgccggatttggcaggtgacctcacggcgagtatcgccgccctgagcaacgcccttcaggcagccgaataccccgcccgcgactttagcgaagcaaaaatacaggccggctatgcacaattgtgggcgacaaaggtgaaggaaagtctgtcggcagcgtctgcacggctgaccgaaagaccgctggatgaacattcacggggcgcacgccttgccaaacattgggcaaacctcgccaaagaacggagcgtgggtaattatccgccgccggatgcacagcaggtacttgcctccctgaaggaacaggggctattagcggggaccctttcaaccggagatccggccgggtatcttttcgccacccggcttgccggtgagcttgaaaatgccggtaatggtgaattgcgattaccgatgagtccggagcaatatgttgctttagagaagggacttgttgagtatattgtaaaatggggacaacggcggatctcacaaggagtcacccgcattgttattgagttgtcctttgagcaggctctggatacggtatcgttcaacgtgtccaagctcttccggttaccttataaggtgctgaaggcctcgataaaaataccgtacaatgtcaataaggttaataattataccatgccgggccatgataagccctataaggcaatttatggcttgctgggaaaaaagcttaagcaacttggctttaatttactgacggcacccgtgcctggcgtgatgaaacttgtggctggcaccgggataaccgcaggtgcaggcgtgcataatttacgtgtcgaaaatagagagaaaacattcagcgcggtttatcaacacgtggtggaaggaaagcaaagtgaaaaaataaaaatggactccgtgaagtcgatgatttttgattcagtgctcgataccgccactacggccgcttttaaagggggacgaagagcctggcaatcaggaagaaataaaaacgacattgaaatcaatgaggtaacactttctcaagcacagcagcgccaagtggcagccaacaatgttgacactgcatgggggaatgctgctgcgaatgagaggaaggttgagccagtgagtcattcatcaccattacagcaacaaaccgatgttaggccgttctctgataagagtgaccaggatgctgctcaacctcgagtacgtaaacgggcagtggcggatatggctccccctccccctcatcaatggcataataacattcctgccaacacgacgctacagtcagaacattttgattttgatcgtgacatacgttatcagggcttctccgatgagaagaaaaaacaaacctatttacatggtattcaacttgtattgcttcagatacaaaatgatggacgctttgcacagaagatcaggaataatgcctaccttgccagtataggcgtttcgaacttagtacctgtcgatatagaaggatataaacttaaaaatacatttcttcttcctgatagcccaagtgctaaatctggagttattgttcgcttagattctgaaaatccttattactatgttggcaaagggagtgatcttttagaagacatcaaatgggccatgcctcatgatgctaatgaacagaagtatgaatatatgcctgattctgatgggaacgctcacttttaccgtctgcgcaacggttttgatatctttaatgatattaggatggggaattcaagtttcgaatatttctttaattataataatccggagccgataagcatcacgagactttcttcatatcttgcaaatactattgagggtgactataaaaacggatcgtcgcccccaaaaaacaaactattaatttccagagcgattactggtgctcatattcctgacccaggggtcactgcaaccgccgctggatatcatatcgaattcacctgggataatttgacttcagcagagtatctgaggtcattttcaaggcccttctctaccctcagtggagaaatgcagttagtgtctagctccattaatggagaaacgatacaggaaacagagctgcatgttcatcaggctgaatatataggaagctgggttgatgctactgtcggggccatcacatctttcacgccggagggatgggttctcaataccacactatcggcagcggacattgctgctgatttgacagaagataaggatcctgacccaatggcggttgctggcctggttgtaggatgcattcctggtggtcggattgcagctaaagtcggaaagttcacccgtattggcggtaaggttgttaaatacgggcttatgcttggcaataaagcggtcgacctggccatcgtagggaagagcgttaagatagctgtagacacgggtgatccactcgcaatttataaggcgcttctgatcagtggcataggtactacgaattcttacgatatggcaaagaatatgtcatcaaagctaaaaatcagcaagaaactggaagacagtgttcaattagataaaccactacaaaatctaaggggaggaagcaagcgtcctgaagagggtgaatcaacctcgcagaagcgttcacagccagatgagagtccagaaaatagtcaggaggctgtatattcaggcccctccggcagagctcgggtgacttttgaccagacgaccgaacatcatataatgcttaatagattttccagacttgtgttagctagaagttttgcagagaaaagaatacagtcttttgaacacagttcttcgaaatttaaaagcagtgacgagtttaaggtagataaaagcatacctttagatgcacaaaatgcttcacttaacgacatggcgagtaagacagataacttaattaatcagctagaacaatttacaggagataagaaagaatccatttccgccaatctgaaaaacatccagttaatgattggtgatataatggaaaatagaaacaataggaatgataatttaaatttccatacttatgtcttggttgggaaaaatacaacatatgacgaaataagtaactattatggttttgctgagtttaaattttcaataaataatggcaatcttactcttaacaaccttataggccacccttatgtcgtcattaataaataccctgaatttagagattatttgataagaaatggagtcatcacccaacccgagcttgaaccatataacataaagaatgtggctcggtatcttggctctaaagcggtgagcagtgagattggttattatgaatccattccagctactaaagtgaagattctctcgtttactggagccaatccgattacgcaaaaattaggtaatacacttcagagtatctctgatcttttttcaaaaaaacgattttcggacgaaccgaatgacgccatcactcaggatgaactatttacccgtcagactgatttatatacttatgatgagatgataaatcatctaaaaactatagtaagaacgacattcacacctgttaaaccgatagaagaaatatccagtgaaaaaactgatgcggccattaaaggaataatgaccaatggggatgcggaaataatttccgaaaacattatcgagagcaaaaatagtttagaccatgatacaagttatttttctcatgaagttatttcagctgttgatcgtgcatatgaaaaagtaaactccgtgaaatctctttttgaacgtgcagaatctcagcctgagattaaatctcaattaaaatcattaattaatgaagccactggattgaatgatgaggttatcattgatattgataaagtagatgtttctagcatatcagacatggcctataacaggtttaaagataatatcaatactctacatgactatctctctaagcaaaaatcagggggttatacatcctttgttttatttaaatatcgccagtttaatccatccaagcctgatgcctttgccatgccctatgacagtaagaaaagaatttttctggctatgttgccagaaaatcagcgccatggtggattagttgatacggtgacccatgaagcttcacataattcttcttacacattagatcatacttatatagggaacgcgcggagtaacaccggttcatttccttcctcatttgaacctccaactcgagattcgaggtatttttatgaaaatgaacgggtaggtaaactgagtgcaaagtatgctttagacttacccgaaaatgctaatatcacccaaaatcaactagcgcaggcagatattctgttaagaaacagcaggttgactaaagcagatacgcttctgaatgctgcagaatataatgcttatatgattgacgttctaagccgggtaaaaataaacggctcacatattgagtttgaagaaaactcatccagaagcaaacgctctgtttccggaggaaatcataaacttgatgatataattatactggcttcgatgaacgctacgcttcctaggagggaggggggggaatttgagtcatctaccttcaagaaaacattaacggaatttataaacaagggtacgaccagcagtcaggttgatcctgtttatgcatcctatctaccagcgtttaataccattgtagatagcgagggtattacattgcaacaggtgaaagacttaaaatcagctctgcccgcaaccggcaacgatctgagggctcaagccagatataactatgcggtgctacaatatttatctgggtcggcaggaattaagctaccaattgatactgatgtaatacgaaatagcattaatgatgatctgaatattgcaagttgcgtagataactgtaaaaaggcagcctcacaaaggcttgagttgttgaaggcggtgccagaatatttatctgggccggaagcaattcacgcacagattgatactaatttaatgataaatagaattaagaacactctgaaacatgaaaattacacatatgatcttaaagtaaatgaaagggattatcttttattacagttggaacaaaaatatatagcttcgagtaaacctcctaaagtcggagctcaaaaatggagtgctgacataaataaagaaattaattatttatgcgatgagatcgaagaaaaaaaacgcgaggtggtttgttgggagaataagaagaatgaatcatcacgaagacttgatttgtggagtacggcgacgaaatatttatctgacccgaaaggaattaaaccaccgattgatactgatgtaatactcaataacattaatgatgttcttaatcatgctggctacgtatataactataaagtgagagaaaaggataatcttgagaaaaagttgagtagaacccccctaacaagtcagatagaagtgaaccgtttacaaaccgagatcgcaaaaagatatagactaatagattattgggggaaaaaagcagatgaaacattactaatgtttatcttgtggaggaatgtgtttggttaaggtacccttgaggtgctgtttcagggaccaggaggtagtggatctgcttggagccatccacagttcgaaaaaggtggaggttctggcggtggatcaggtggaagtgcatggtctcaccctcagtttgagaaataaggatccggctgctaacaaagcccgaaaggaagctgagttggctgctgccaccgctgagcaataactagcataaccccttggggcctctaaacgggtcttgaggggttttttgctgaaaggaggaactatatccggatatcccgcaagaggcccggcagtaccggcataaccaagcctatgcctacagcatccagggtgacggtgccgaggatgacgatgagcgcattgttagatttcatacacggtgcctgactgcgttagcaatttaactgtgataaactaccgcattaaagcttatcgatgataagctgtcaaacatgagaattcttgaagacgaaagggcctcgtgatacgcctatttttataggttaatgtcatgataataatggtttcttagacgtcaggtggcacttttcggggaaatgtgcgcggaacccctatttgtttatttttctaaatacattcaaatatgtatccgctcatgagacaataaccctgataaatgcttcaataatattgaaaaaggaagagtatgagtattcaacatttccgtgtcgcccttattcccttttttgcggcattttgccttcctgtttttgctcacccagaaacgctggtgaaagtaaaagatgctgaagatcagttgggtgcacgagtgggttacatcgaactggatctcaacagcggtaagatccttgagagttttcgccccgaagaacgttttccaatgatgagcacttttaaagttctgctatgtggcgcggtattatcccgtgttgacgccgggcaagagcaactcggtcgccgcatacactattctcagaatgacttggttgagtactcaccagtcacagaaaagcatcttacggatggcatgacagtaagagaattatgcagtgctgccataaccatgagtgataacactgcggccaacttacttctgacaacgatcggaggaccgaaggagctaaccgcttttttgcacaacatgggggatcatgtaactcgccttgatcgttgggaaccggagctgaatgaagccataccaaacgacgagcgtgacaccacgatgcctgcagcaatggcaacaacgttgcgcaaactattaactggcgaactacttactctagcttcccggcaacaattaatagactggatggaggcggataaagttgcaggaccacttctgcgctcggcccttccggctggctggtttattgctgataaatctggagccggtgagcgtgggtctcgcggtatcattgcagcactggggccagatggtaagccctcccgtatcgtagttatctacacgacggggagtcaggcaactatggatgaacgaaatagacagatcgctgagataggtgcctcactgattaagcattggtaactgtcagaccaagtttactcatatatactttagattgatttaaaacttcatttttaatttaaaaggatctaggtgaagatcctttttgataatctcatgaccaaaatcccttaacgtgagttttcgttccactgagcgtcagaccccgtagaaaagatcaaaggatcttcttgagatcctttttttctgcgcgtaatctgctgcttgcaaacaaaaaaaccaccgctaccagcggtggtttgtttgccggatcaagagctaccaactctttttccgaaggtaactggcttcagcagagcgcagataccaaatactgtccttctagtgtagccgtagttaggccaccacttcaagaactctgtagcaccgcctacatacctcgctctgctaatcctgttaccagtggctgctgccagtggcgataagtcgtgtcttaccgggttggactcaagacgatagttaccggataaggcgcagcggtcgggctgaacggggggttcgtgcacacagcccagcttggagcgaacgacctacaccgaactgagatacctacagcgtgagctatgagaaagcgccacgcttcccgaagggagaaaggcggacaggtatccggtaagcggcagggtcggaacaggagagcgcacgagggagcttccagggggaaacgcctggtatctttatagtcctgtcgggtttcgccacctctgacttgagcgtcgatttttgtgatgctcgtcaggggggcggagcctatggaaaaacgccagcaacgcggcctttttacggttcctggccttttgctggccttttgctcacatgttctttcctgcgttatcccctgattctgtggataaccgtattaccgcctttgagtgagctgataccgctcgccgcagccgaacgaccgagcgcagcgagtcagtgagcgaggaagcggaagagcgcctgatgcggtattttctccttacgcatctgtgcggtatttcacaccgcatatatggtgcactctcagtacaatctgctctgatgccgcatagttaagccagtatacactccgctatcgctacgtgactgggtcatggctgcgccccgacacccgccaacacccgctgacgcgccctgacgggcttgtctgctcccggcatccgcttacagacaagctgtgaccgtctccgggagctgcatgtgtcagaggttttcaccgtcatcaccgaaacgcgcgaggcagctgcggtaaagctcatcagcgtggtcgtgaagcgattcacagatgtctgcctgttcatccgcgtccagctcgttgagtttctccagaagcgttaatgtctggcttctgataaagcgggccatgttaagggcggttttttcctgtttggtcactgatgcctccgtgtaagggggatttctgttcatgggggtaatgataccgatgaaacgagagaggatgctcacgatacgggttactgatgatgaacatgcccggttactggaacgttgtgagggtaaacaactggcggtatggatgcggcgggaccagagaaaaatcactcagggtcaatgccagcgcttcgttaatacagatgtaggtgttccacagggtagccagcagcatcctgcgatgcagatccggaacataatggtgcagggcgctgacttccgcgtttccagactttacgaaacacggaaaccgaagaccattcatgttgttgctcaggtcgcagacgttttgcagcagcagtcgcttcacgttcgctcgcgtatcggtgattcattctgctaaccagtaaggcaaccccgccagcctagccgggtcctcaacgacaggagcacgatcatgcgcacccgtggccaggacccaacgctgcccgagatgcgccgcgtgcggctgctggagatggcggacgcgatggatatgttctgccaagggttggtttgcgcattcacagttctccgcaagaattgattggctccaattcttggagtggtgaatccgttagcgaggtgccgccggcttccattcaggtcgaggtggcccggctccatgcaccgcgacgcaacgcggggaggcagacaaggtatagggcggcgcctacaatccatgccaacccgttccatgtgctcgccgaggcggcataaatcgccgtgacgatcagcggtccagtgatcgaagttaggctggtaagagccgcgagcgatccttgaagctgtccctgatggtcgtcatctacctgcctggacagcatggcctgcaacgcgggcatcccgatgccgccggaagcgagaagaatcataatggggaaggccatccagcctcgcgtcgcgaacgccagcaagacgtagcccagcgcgtcggccgccatgccggcgataatggcctgcttctcgccgaaacgtttggtggcgggaccagtgacgaaggcttgagcgagggcgtgcaagattccgaataccgcaagcgacaggccgatcatcgtcgcgctccagcgaaagcggtcctcgccgaaaatgacccagagcgctgccggcacctgtcctacgagttgcatgataaagaagacagtcataagtgcggcgacgatagtcatgccccgcgcccaccggaaggagctgactgggttgaaggctctcaagggcatcggtcgagatcccggtgcctaatgagtgagctaacttacattaattgcgttgcgctcactgcccgctttccagtcgggaaacctgtcgtgccagctgcattaatgaatcggccaacgcgcggggagaggcggtttgcgtattgggcgccagggtggtttttcttttcaccagtgagacgggcaacagctgattgcccttcaccgcctggccctgagagagttgcagcaagcggtccacgctggtttgccccagcaggcgaaaatcctgtttgatggtggttaacggcgggatataacatgagctgtcttcggtatcgtcgtatcccactaccgagatatccgcaccaacgcgcagcccggactcggtaatggcgcgcattgcgcccagcgccatctgatcgttggcaaccagcatcgcagtgggaacgatgccctcattcagcatttgcatggtttgttgaaaaccggacatggcactccagtcgccttcccgttccgctatcggctgaatttgattgcgagtgagatatttatgccagccagccagacgcagacgcgccgagacagaacttaatgggcccgctaacagcgcgatttgctggtgacccaatgcgaccagatgctccacgcccagtcgcgtaccgtcttcatgggagaaaataatactgttgatgggtgtc

SEQ ID NO: 141 - protein, 2337 aa, Serratia entomophila
MQGGVGVSPPDEGGDLSAGSNNDHLFAFIRETHLEEAQEFRLKGYNSQVPEVDEGLLTQLRDDLAAAKSRQYVQASVGGPLGSRWLLEQIGKIERLTDKFSDEVIKRWVKHELPRKNVGEAAGTELGSRRRAQSLARRLESTMQTLIRVVHTLHAMDDYSTPEKRHDMLVAELTGAFSSSDKNTVIQALGRMTAETSGHAAWASLMQARTAAWEAGKSATVDAMIATSQHEAEKANKKARELQGDSQAFFSHVAAYLQSLSSDLAKVSINMGQSTSSSTIRNEAEKASELQGDSQTFVSHVAAYLQSLPSDLAKVPINMWQNMDFVKTKLQAQTAVAGMKVHAHRLVRIAQHGHSTKTPAKDPEQVVTDSIIRSILWLWQQPAIKIQCASTALLSKVGELKKIEGILASYAVTDELGNEQERRNPPGEEDLDAQLREWVSASLKQENPENQRAVKVVTLERLLGGDIASARNLVERLGKAEEGIQNLLRRQQVAVLKMSVERLPAAVSSLKAVDKLLPDLAGDLTASIAALSNALQAAEYPARDFSEAKIQAGYAQLWATKVKESLSAASARLTERPLDEHSRGARLAKHWANLAKERSVGNYPPPDAQQVLASLKEQGLLAGTLSTGDPAGYLFATRLAGELENAGNGELRLPMSPEQYVALEKGLVEYIVKWGQRRISQGVTRIVIELSFEQALDTVSFNVSKLFRLPYKVLKASIKIPYNVNKVNNYTMPGHDKPYKAIYGLLGKKLKQLGFNLLTAPVPGVMKLVAGTGITAGAGVHNLRVENREKTFSAVYQHVVEGKQSEKIKMDSVKSMIFDSVLDTATTAAFKGGRRAWQSGRNKNDIEINEVTLSQAQQRQVAANNVDTAWGNAAANERKVEPVSHSSPLQQQTDVRPFSDKSDQDAAQPRVRKRAVADMAPPPPHQWHNNIPANTTLQSEHFDFDRDIRYQGFSDEKKKQTYLHGIQLVLLQIQNDGRFAQKIRNNAYLASIGVSNLVPVDIEGYKLKNTFLLPDSPSAKSGVIVRLDSENPYYYVGKGSDLLEDIKWAMPHDANEQKYEYMPDSDGNAHFYRLRNGFDIFNDIRMGNSSFEYFFNYNNPEPISITRLSSYLANTIEGDYKNGSSPPKNKLLISRAITGAHIPDPGVTATAAGYHIEFTWDNLTSAEYLRSFSRPFSTLSGEMQLVSSSINGETIQETELHVHQAEYIGSWVDATVGAITSFTPEGWVLNTTLSAADIAADLTEDKDPDPMAVAGLVVGCIPGGRIAAKVGKFTRIGGKVVKYGLMLGNKAVDLAIVGKSVKIAVDTGDPLAIYKALLISGIGTTNSYDMAKNMSSKLKISKKLEDSVQLDKPLQNLRGGSKRPEEGESTSQKRSQPDESPENSQEAVYSGPSGRARVTFDQTTEHHIMLNRFSRLVLARSFAEKRIQSFEHSSSKFKSSDEFKVDKSIPLDAQNASLNDMASKTDNLINQLEQFTGDKKESISANLKNIQLMIGDIMENRNNRNDNLNFHTYVLVGKNTTYDEISNYYGFAEFKFSINNGNLTLNNLIGHPYVVINKYPEFRDYLIRNGVITQPELEPYNIKNVARYLGSKAVSSEIGYYESIPATKVKILSFTGANPITQKLGNTLQSISDLFSKKRFSDEPNDAITQDELFTRQTDLYTYDEMINHLKTIVRTTFTPVKPIEEISSEKTDAAIKGIMTNGDAEIISENIIESKNSLDHDTSYFSHEVISAVDRAYEKVNSVKSLFERAESQPEIKSQLKSLINEATGLNDEVIIDIDKVDVSSISDMAYNRFKDNINTLHDYLSKQKSGGYTSFVLFKYRQFNPSKPDAFAMPYDSKKRIFLAMLPENQRHGGLVDTVTHEASHNSSYTLDHTYIGNARSNTGSFPSSFEPPTRDSRYFYENERVGKLSAKYALDLPENANITQNQLAQADILLRNSRLTKADTLLNAAEYNAYMIDVLSRVKINGSHIEFEENSSRSKRSVSGGNHKLDDIIILASMNATLPRREGGEFESSTFKKTLTEFINKGTTSSQVDPVYASYLPAFNTIVDSEGITLQQVKDLKSALPATGNDLRAQARYNYAVLQYLSGSAGIKLPIDTDVIRNSINDDLNIASCVDNCKKAASQRLELLKAVPEYLSGPEAIHAQIDTNLMINRIKNTLKHENYTYDLKVNERDYLLLQLEQKYIASSKPPKVGAQKWSADINKEINYLCDEIEEKKREVVCWENKKNESSRRLDLWSTATKYLSDPKGIKPPIDTDVILNNINDVLNHAGYVYNYKVREKDNLEKKLSRTPLTSQIEVNRLQTEIAKRYRLIDYWGKKADETLLMFILWRNVFG

SEQ ID NO: 142 - DNA, 5869 bp, Serratia entomophila
  source 1..5869: mol_type = other DNA
  CDS 933..1025: note = Afp18 C10 terminal truncation S30
tggtcagagacatcaagaaataacgccggaacattagtgcaggcagcttccacagcaatggcatcctggtcatccagcggatagttaatgatcagcccactgacgcgttgcgcgagaagattgtgcaccgccgctttacaggcttcgacgccgcttcgttctaccatcgacaccaccacgctggcacccagttgatcggcgcgagatttaatcgccgcgacaatttgcgacggcgcgtgcagggccagactggaggtggcaacgccaatcagcaacgactgtttgcccgccagttgttgtgccacgcggttgggaatgtaattcagctccgccatcgccgcttccactttttcccgcgttttcgcagaaacgtggctggcctggttcaccacgcgggaaacggtctgataagagacaccggcatactctgcgacatcgtataacgttactggtttcacattcaccaccctgaattgactctcttccgggcgctatcatgccataccgcgaaaggttttgcgccattcgatggtgtccgggatctcgacgctctcccttatgcgactcctgcattaggaagcagcccagtagtaggttgaggccgttgagcaccgccgccgcaaggaatggtgcatgcaaggagatggcgcccaacagtcccccggccacggggcctgccaccatacccacgccgaaacaagcgctcatgagcccgaagtggcgagcccgatcttccccatcggtgatgtcggcgatataggcgccagcaaccgcacctgtggcgccggtgatgccggccacgatgcgtccggcgtagaggatcgagatctcgatcccgcgaaattaatacgactcactataggggaattgtgagcggataacaattcccctctagaaataattttgtttaactttaagaaggagatatacatatgccttactccagtgagtcgaaggaaaaagaaacacactcaaaagaaaccgaaagagataatgctgacccagtatttcaacgggtcagctaaggtacccttgaggtgctgtttcagggaccaggaggtagtggatctgcttggagccatccacagttcgaaaaaggtggaggttctggcggtggatcaggtggaagtgcatggtctcaccctcagtttgagaaataaggatccggctgctaacaaagcccgaaaggaagctgagttggctgctgccaccgctgagcaataactagcataaccccttggggcctctaaacgggtcttgaggggttttttgctgaaaggaggaactatatccggatatcccgcaagaggcccggcagtaccggcataaccaagcctatgcctacagcatccagggtgacggtgccgaggatgacgatgagcgcattgttagatttcatacacggtgcctgactgcgttagcaatttaactgtgataaactaccgcattaaagcttatcgatgataagctgtcaaacatgagaattcttgaagacgaaagggcctcgtgatacgcctatttttataggttaatgtcatgataataatggtttcttagacgtcaggtggcacttttcggggaaatgtgcgcggaacccctatttgtttatttttctaaatacattcaaatatgtatccgctcatgagacaataaccctgataaatgcttcaataatattgaaaaaggaagagtatgagtattcaacatttccgtgtcgcccttattcccttttttgcggcattttgccttcctgtttttgctcacccagaaacgctggtgaaagtaaaagatgctgaagatcagttgggtgcacgagtgggttacatcgaactggatctcaacagcggtaagatccttgagagttttcgccccgaagaacgttttccaatgatgagcacttttaaagttctgctatgtggcgcggtattatcccgtgttgacgccgggcaagagcaactcggtcgccgcatacactattctcagaatgacttggttgagtactcaccagtcacagaaaagcatcttacggatggcatgacagtaagagaattatgcagtgctgccataaccatgagtgataacactgcggccaacttacttctgacaacgatcggaggaccgaaggagctaaccgcttttttgcacaacatgggggatcatgtaactcgccttgatcgttgggaaccggagctgaatgaagccataccaaacgacgagcgtgacaccacgatgcctgcagcaatggcaacaacgttgcgcaaactattaactggcgaactacttactctagcttcccggcaacaattaatagactggatggaggcggataaagttgcaggaccacttctgcgctcggcccttccggctggctggtttattgctgataaatctggagccggtgagcgtgggtctcgcggtatcattgcagcactggggccagatggtaagccctcccgtatcgtagttatctacacgacggggagtcaggcaactatggatgaacgaaatagacagatcgctgagataggtgcctcactgattaagcattggtaactgtcagaccaagtttactcatatatactttagattgatttaaaacttcatttttaatttaaaaggatctaggtgaagatcctttttgataatctcatgaccaaaatcccttaacgtgagttttcgttccactgagcgtcagaccccgtagaaaagatcaaaggatcttcttgagatcctttttttctgcgcgtaatctgctgcttgcaaacaaaaaaaccaccgctaccagcggtggtttgtttgccggatcaagagctaccaactctttttccgaaggtaactggcttcagcagagcgcagataccaaatactgtccttctagtgtagccgtagttaggccaccacttcaagaactctgtagcaccgcctacatacctcgctctgctaatcctgttaccagtggctgctgccagtggcgataagtcgtgtcttaccgggttggactcaagacgatagttaccggataaggcgcagcggtcgggctgaacggggggttcgtgcacacagcccagcttggagcgaacgacctacaccgaactgagatacctacagcgtgagctatgagaaagcgccacgcttcccgaagggagaaaggcggacaggtatccggtaagcggcagggtcggaacaggagagcgcacgagggagcttccagggggaaacgcctggtatctttatagtcctgtcgggtttcgccacctctgacttgagcgtcgatttttgtgatgctcgtcaggggggcggagcctatggaaaaacgccagcaacgcggcctttttacggttcctggccttttgctggccttttgctcacatgttctttcctgcgttatcccctgattctgtggataaccgtattaccgcctttgagtgagctgataccgctcgccgcagccgaacgaccgagcgcagcgagtcagtgagcgaggaagcggaagagcgcctgatgcggtattttctccttacgcatctgtgcggtatttcacaccgcatatatggtgcactctcagtacaatctgctctgatgccgcatagttaagccagtatacactccgctatcgctacgtgactgggtcatggctgcgccccgacacccgccaacacccgctgacgcgccctgacgggcttgtctgctcccggcatccgcttacagacaagctgtgaccgtctccgggagctgcatgtgtcagaggttttcaccgtcatcaccgaaacgcgcgaggcagctgcggtaaagctcatcagcgtggtcgtgaagcgattcacagatgtctgcctgttcatccgcgtccagctcgttgagtttctccagaagcgttaatgtctggcttctgataaagcgggccatgttaagggcggttttttcctgtttggtcactgatgcctccgtgtaagggggatttctgttcatgggggtaatgataccgatgaaacgagagaggatgctcacgatacgggttactgatgatgaacatgcccggttactggaacgttgtgagggtaaacaactggcggtatggatgcggcgggaccagagaaaaatcactcagggtcaatgccagcgcttcgttaatacagatgtaggtgttccacagggtagccagcagcatcctgcgatgcagatccggaacataatggtgcagggcgctgacttccgcgtttccagactttacgaaacacggaaaccgaagaccattcatgttgttgctcaggtcgcagacgttttgcagcagcagtcgcttcacgttcgctcgcgtatcggtgattcattctgctaaccagtaaggcaaccccgccagcctagccgggtcctcaacgacaggagcacgatcatgcgcacccgtggccaggacccaacgctgcccgagatgcgccgcgtgcggctgctggagatggcggacgcgatggatatgttctgccaagggttggtttgcgcattcacagttctccgcaagaattgattggctccaattcttggagtggtgaatccgttagcgaggtgccgccggcttccattcaggtcgaggtggcccggctccatgcaccgcgacgcaacgcggggaggcagacaaggtatagggcggcgcctacaatccatgccaacccgttccatgtgctcgccgaggcggcataaatcgccgtgacgatcagcggtccagtgatcgaagttaggctggtaagagccgcgagcgatccttgaagctgtccctgatggtcgtcatctacctgcctggacagcatggcctgcaacgcgggcatcccgatgccgccggaagcgagaagaatcataatggggaaggccatccagcctcgcgtcgcgaacgccagcaagacgtagcccagcgcgtcggccgccatgccggcgataatggcctgcttctcgccgaaacgtttggtggcgggaccagtgacgaaggcttgagcgagggcgtgcaagattccgaataccgcaagcgacaggccgatcatcgtcgcgctccagcgaaagcggtcctcgccgaaaatgacccagagcgctgccggcacctgtcctacgagttgcatgataaagaagacagtcataagtgcggcgacgatagtcatgccccgcgcccaccggaaggagctgactgggttgaaggctctcaagggcatcggtcgagatcccggtgcctaatgagtgagctaacttacattaattgcgttgcgctcactgcccgctttccagtcgggaaacctgtcgtgccagctgcattaatgaatcggccaacgcgcggggagaggcggtttgcgtattgggcgccagggtggtttttcttttcaccagtgagacgggcaacagctgattgcccttcaccgcctggccctgagagagttgcagcaagcggtccacgctggtttgccccagcaggcgaaaatcctgtttgatggtggttaacggcgggatataacatgagctgtcttcggtatcgtcgtatcccactaccgagatatccgcaccaacgcgcagcccggactcggtaatggcgcgcattgcgcccagcgccatctgatcgttggcaaccagcatcgcagtgggaacgatgccctcattcagcatttgcatggtttgttgaaaaccggacatggcactccagtcgccttcccgttccgctatcggctgaatttgattgcgagtgagatatttatgccagccagccagacgcagacgcgccgagacagaacttaatgggcccgctaacagcgcgatttgctggtgacccaatgcgaccagatgctccacgcccagtcgcgtaccgtcttcatgggagaaaataatactgttgatgggtgtc

SEQ ID NO: 143 - protein, 30 aa, Serratia entomophila; identical to SEQ ID NO: 84

SEQ ID NO: 144 - DNA, 6064 bp, Serratia entomophila
  source 1..6064: mol_type = other DNA
  CDS 933..1220: note = SEAfp18 C terminal truncation A95
tggtcagagacatcaagaaataacgccggaacattagtgcaggcagcttccacagcaatggcatcctggtcatccagcggatagttaatgatcagcccactgacgcgttgcgcgagaagattgtgcaccgccgctttacaggcttcgacgccgcttcgttctaccatcgacaccaccacgctggcacccagttgatcggcgcgagatttaatcgccgcgacaatttgcgacggcgcgtgcagggccagactggaggtggcaacgccaatcagcaacgactgtttgcccgccagttgttgtgccacgcggttgggaatgtaattcagctccgccatcgccgcttccactttttcccgcgttttcgcagaaacgtggctggcctggttcaccacgcgggaaacggtctgataagagacaccggcatactctgcgacatcgtataacgttactggtttcacattcaccaccctgaattgactctcttccgggcgctatcatgccataccgcgaaaggttttgcgccattcgatggtgtccgggatctcgacgctctcccttatgcgactcctgcattaggaagcagcccagtagtaggttgaggccgttgagcaccgccgccgcaaggaatggtgcatgcaaggagatggcgcccaacagtcccccggccacggggcctgccaccatacccacgccgaaacaagcgctcatgagcccgaagtggcgagcccgatcttccccatcggtgatgtcggcgatataggcgccagcaaccgcacctgtggcgccggtgatgccggccacgatgcgtccggcgtagaggatcgagatctcgatcccgcgaaattaatacgactcactataggggaattgtgagcggataacaattcccctctagaaataattttgtttaactttaagaaggagatatacatatgccttactccagtgagtcgaaggaaaaagaaacacactcaaaagaaaccgaaagagataatgctgacccagtatttcaacgggtcagccagggcggcgtgggtgtttcaccgcctgatgaggggggagacttgtcggccggaagtaacaatgaccatttattcgcttttattcgtgaaacacacttggaagaagcccaggaattcaggctaaaagggtataacagccaggtgcccgaggttgacgagggattactgacgcagctgcgtgacgacctggcggcgtaaggtacccttgaggtgctgtttcagggaccaggaggtagtggatctgcttggagccatccacagttcgaaaaaggtggaggttctggcggtggatcaggtggaagtgcatggtctcaccctcagtttgagaaataaggatccggctgctaacaaagcccgaaaggaagctgagttggctgctgccaccgctgagcaataactagcataaccccttggggcctctaaacgggtcttgaggggttttttgctgaaaggaggaactatatccggatatcccgcaagaggcccggcagtaccggcataaccaagcctatgcctacagcatccagggtgacggtgccgaggatgacgatgagcgcattgttagatttcatacacggtgcctgactgcgttagcaatttaactgtgataaactaccgcattaaagcttatcgatgataagctgtcaaacatgagaattcttgaagacgaaagggcctcgtgatacgcctatttttataggttaatgtcatgataataatggtttcttagacgtcaggtggcacttttcggggaaatgtgcgcggaacccctatttgtttatttttctaaatacattcaaatatgtatccgctcatgagacaataaccctgataaatgcttcaataatattgaaaaaggaagagtatgagtattcaacatttccgtgtcgcccttattcccttttttgcggcattttgccttcctgtttttgctcacccagaaacgctggtgaaagtaaaagatgctgaagatcagttgggtgcacgagtgggttacatcgaactggatctcaacagcggtaagatccttgagagttttcgccccgaagaacgttttccaatgatgagcacttttaaagttctgctatgtggcgcggtattatcccgtgttgacgccgggcaagagcaactcggtcgccgcatacactattctcagaatgacttggttgagtactcaccagtcacagaaaagcatcttacggatggcatgacagtaagagaattatgcagtgctgccataaccatgagtgataacactgcggccaacttacttctgacaacgatcggaggaccgaaggagctaaccgcttttttgcacaacatgggggatcatgtaactcgccttgatcgttgggaaccggagctgaatgaagccataccaaacgacgagcgtgacaccacgatgcctgcagcaatggcaacaacgttgcgcaaactattaactggcgaactacttactctagcttcccggcaacaattaatagactggatggaggcggataaagttgcaggaccacttctgcgctcggcccttccggctggctggtttattgctgataaatctggagccggtgagcgtgggtctcgcggtatcattgcagcactggggccagatggtaagccctcccgtatcgtagttatctacacgacggggagtcaggcaactatggatgaacgaaatagacagatcgctgagataggtgcctcactgattaagcattggtaactgtcagaccaagtttactcatatatactttagattgatttaaaacttcatttttaatttaaaaggatctaggtgaagatcctttttgataatctcatgaccaaaatcccttaacgtgagttttcgttccactgagcgtcagaccccgtagaaaagatcaaaggatcttcttgagatcctttttttctgcgcgtaatctgctgcttgcaaacaaaaaaaccaccgctaccagcggtggtttgtttgccggatcaagagctaccaactctttttccgaaggtaactggcttcagcagagcgcagataccaaatactgtccttctagtgtagccgtagttaggccaccacttcaagaactctgtagcaccgcctacatacctcgctctgctaatcctgttaccagtggctgctgccagtggcgataagtcgtgtcttaccgggttggactcaagacgatagttaccggataaggcgcagcggtcgggctgaacggggggttcgtgcacacagcccagcttggagcgaacgacctacaccgaactgagatacctacagcgtgagctatgagaaagcgccacgcttcccgaagggagaaaggcggacaggtatccggtaagcggcagggtcggaacaggagagcgcacgagggagcttccagggggaaacgcctggtatctttatagtcctgtcgggtttcgccacctctgacttgagcgtcgatttttgtgatgctcgtcaggggggcggagcctatggaaaaacgccagcaacgcggcctttttacggttcctggccttttgctggccttttgctcacatgttctttcctgcgttatcccctgattctgtggataaccgtattaccgcctttgagtgagctgataccgctcgccgcagccgaacgaccgagcgcagcgagtcagtgagcgaggaagcggaagagcgcctgatgcggtattttctccttacgcatctgtgcggtatttcacaccgcatatatggtgcactctcagtacaatctgctctgatgccgcatagttaagccagtatacactccgctatcgctacgtgactgggtcatggctgcgccccgacacccgccaacacccgctgacgcgccctgacgggcttgtctgctcccggcatccgcttacagacaagctgtgaccgtctccgggagctgcatgtgtcagaggttttcaccgtcatcaccgaaacgcgcgaggcagctgcggtaaagctcatcagcgtggtcgtgaagcgattcacagatgtctgcctgttcatccgcgtccagctcgttgagtttctccagaagcgttaatgtctggcttctgataaagcgggccatgttaagggcggttttttcctgtttggtcactgatgcctccgtgtaagggggatttctgttcatgggggtaatgataccgatgaaacgagagaggatgctcacgatacgggttactgatgatgaacatgcccggttactggaacgttgtgagggtaaacaactggcggtatggatgcggcgggaccagagaaaaatcactcagggtcaatgccagcgcttcgttaatacagatgtaggtgttccacagggtagccagcagcatcctgcgatgcagatccggaacataatggtgcagggcgctgacttccgcgtttccagactttacgaaacacggaaaccgaagaccattcatgttgttgctcaggtcgcagacgttttgcagcagcagtcgcttcacgttcgctcgcgtatcggtgattcattctgctaaccagtaaggcaaccccgccagcctagccgggtcctcaacgacaggagcacgatcatgcgcacccgtggccaggacccaacgctgcccgagatgcgccgcgtgcggctgctggagatggcggacgcgatggatatgttctgccaagggttggtttgcgcattcacagttctccgcaagaattgattggctccaattcttggagtggtgaatccgttagcgaggtgccgccggcttccattcaggtcgaggtggcccggctccatgcaccgcgacgcaacgcggggaggcagacaaggtatagggcggcgcctacaatccatgccaacccgttccatgtgctcgccgaggcggcataaatcgccgtgacgatcagcggtccagtgatcgaagttaggctggtaagagccgcgagcgatccttgaagctgtccctgatggtcgtcatctacctgcctggacagcatggcctgcaacgcgggcatcccgatgccgccggaagcgagaagaatcataatggggaaggccatccagcctcgcgtcgcgaacgccagcaagacgtagcccagcgcgtcggccgccatgccggcgataatggcctgcttctcgccgaaacgtttggtggcgggaccagtgacgaaggcttgagcgagggcgtgcaagattccgaataccgcaagcgacaggccgatcatcgtcgcgctccagcgaaagcggtcctcgccgaaaatgacccagagcgctgccggcacctgtcctacgagttgcatgataaagaagacagtcataagtgcggcgacgatagtcatgccccgcgcccaccggaaggagctgactgggttgaaggctctcaagggcatcggtcgagatcccggtgcctaatgagtgagctaacttacattaattgcgttgcgctcactgcccgctttccagtcgggaaacctgtcgtgccagctgcattaatgaatcggccaacgcgcggggagaggcggtttgcgtattgggcgccagggtggtttttcttttcaccagtgagacgggcaacagctgattgcccttcaccgcctggccctgagagagttgcagcaagcggtccacgctggtttgccccagcaggcgaaaatcctgtttgatggtggttaacggcgggatataacatgagctgtcttcggtatcgtcgtatcccactaccgagatatccgcaccaacgcgcagcccggactcggtaatggcgcgcattgcgcccagcgccatctgatcgttggcaaccagcatcgcagtgggaacgatgccctcattcagcatttgcatggtttgttgaaaaccggacatggcactccagtcgccttcccgttccgctatcggctgaatttgattgcgagtgagatatttatgccagccagccagacgcagacgcgccgagacagaacttaatgggcccgctaacagcgcgatttgctggtgacccaatgcgaccagatgctccacgcccagtcgcgtaccgtcttcatgggagaaaataatactgttgatgggtgtc

SEQ ID NO: 145 - protein, 95 aa, Serratia entomophila
MPYSSESKEKETHSKETERDNADPVFQRVSQGGVGVSPPDEGGDLSAGSNNDHLFAFIRETHLEEAQEFRLKGYNSQVPEVDEGLLTQLRDDLAA

SEQ ID NO: 146 - DNA, 6292 bp, Serratia entomophila
  source 1..6292: mol_type = other DNA
  CDS 933..1448: note = Afp18 C8 truncation T171
tggtcagagacatcaagaaataacgccggaacattagtgcaggcagcttccacagcaatggcatcctggtcatccagcggatagttaatgatcagcccactgacgcgttgcgcgagaagattgtgcaccgccgctttacaggcttcgacgccgcttcgttctaccatcgacaccaccacgctggcacccagttgatcggcgcgagatttaatcgccgcgacaatttgcgacggcgcgtgcagggccagactggaggtggcaacgccaatcagcaacgactgtttgcccgccagttgttgtgccacgcggttgggaatgtaattcagctccgccatcgccgcttccactttttcccgcgttttcgcagaaacgtggctggcctggttcaccacgcgggaaacggtctgataagagacaccggcatactctgcgacatcgtataacgttactggtttcacattcaccaccctgaattgactctcttccgggcgctatcatgccataccgcgaaaggttttgcgccattcgatggtgtccgggatctcgacgctctcccttatgcgactcctgcattaggaagcagcccagtagtaggttgaggccgttgagcaccgccgccgcaaggaatggtgcatgcaaggagatggcgcccaacagtcccccggccacggggcctgccaccatacccacgccgaaacaagcgctcatgagcccgaagtggcgagcccgatcttccccatcggtgatgtcggcgatataggcgccagcaaccgcacctgtggcgccggtgatgccggccacgatgcgtccggcgtagaggatcgagatctcgatcccgcgaaattaatacgactcactataggggaattgtgagcggataacaattcccctctagaaataattttgtttaactttaagaaggagatatacatatgccttactccagtgagtcgaaggaaaaagaaacacactcaaaagaaaccgaaagagataatgctgacccagtatttcaacgggtcagccagggcggcgtgggtgtttcaccgcctgatgaggggggagacttgtcggccggaagtaacaatgaccatttattcgcttttattcgtgaaacacacttggaagaagcccaggaattcaggctaaaagggtataacagccaggtgcccgaggttgacgagggattactgacgcagctgcgtgacgacctggcggcggccaaatcccgccagtacgttcaggcaagcgttggggggccgctgggttctcggtggctgctggaacagataggcaaaatagagcggctgacggacaagttttctgacgaagtaataaaacgctgggttaagcatgagctgccacgaaaaaacgtaggggaagccgcggggaccgagttggggagccggcgtagggctcagtcgctggccagacggttggagtcaacctaaggtacccttgaggtgctgtttcagggaccaggaggtagtggatctgcttggagccatccacagttcgaaaaaggtggaggttctggcggtggatcaggtggaagtgcatggtctcaccctcagtttgagaaataaggatccggctgctaacaaagcccgaaaggaagctgagttggctgctgccaccgctgagcaataactagcataaccccttggggcctctaaacgggtcttgaggggttttttgctgaaaggaggaactatatccggatatcccgcaagaggcccggcagtaccggcataaccaagcctatgcctacagcatccagggtgacggtgccgaggatgacgatgagcgcattgttagatttcatacacggtgcctgactgcgttagcaatttaactgtgataaactaccgcattaaagcttatcgatgataagctgtcaaacatgagaattcttgaagacgaaagggcctcgtgatacgcctatttttataggttaatgtcatgataataatggtttcttagacgtcaggtggcacttttcggggaaatgtgcgcggaacccctatttgtttatttttctaaatacattcaaatatgtatccgctcatgagacaataaccctgataaatgcttcaataatattgaaaaaggaagagtatgagtattcaacatttccgtgtcgcccttattcccttttttgcggcattttgccttcctgtttttgctcacccagaaacgctggtgaaagtaaaagatgctgaagatcagttgggtgcacgagtgggttacatcgaactggatctcaacagcggtaagatccttgagagttttcgccccgaagaacgttttccaatgatgagcacttttaaagttctgctatgtggcgcggtattatcccgtgttgacgccgggcaagagcaactcggtcgccgcatacactattctcagaatgacttggttgagtactcaccagtcacagaaaagcatcttacggatggcatgacagtaagagaattatgcagtgctgccataaccatgagtgataacactgcggccaacttacttctgacaacgatcggaggaccgaaggagctaaccgcttttttgcacaacatgggggatcatgtaactcgccttgatcgttgggaaccggagctgaatgaagccataccaaacgacgagcgtgacaccacgatgcctgcagcaatggcaacaacgttgcgcaaactattaactggcgaactacttactctagcttcccggcaacaattaatagactggatggaggcggataaagttgcaggaccacttctgcgctcggcccttccggctggctggtttattgctgataaatctggagccggtgagcgtgggtctcgcggtatcattgcagcactggggccagatggtaagccctcccgtatcgtagttatctacacgacggggagtcaggcaactatggatgaacgaaatagacagatcgctgagataggtgcctcactgattaagcattggtaactgtcagaccaagtttactcatatatactttagattgatttaaaacttcatttttaatttaaaaggatctaggtgaagatcctttttgataatctcatgaccaaaatcccttaacgtgagttttcgttccactgagcgtcagaccccgtagaaaagatcaaaggatcttcttgagatcctttttttctgcgcgtaatctgctgcttgcaaacaaaaaaaccaccgctaccagcggtggtttgtttgccggatcaagagctaccaactctttttccgaaggtaactggcttcagcagagcgcagataccaaatactgtccttctagtgtagccgtagttaggccaccacttcaagaactctgtagcaccgcctacatacctcgctctgctaatcctgttaccagtggctgctgccagtggcgataagtcgtgtcttaccgggttggactcaagacgatagttaccggataaggcgcagcggtcgggctgaacggggggttcgtgcacacagcccagcttggagcgaacgacctacaccgaactgagatacctacagcgtgagctatgagaaagcgccacgcttcccgaagggagaaaggcggacaggtatccggtaagcggcagggtcggaacaggagagcgcacgagggagcttccagggggaaacgcctggtatctttatagtcctgtcgggtttcgccacctctgacttgagcgtcgatttttgtgatgctcgtcaggggggcggagcctatggaaaaacgccagcaacgcggcctttttacggttcctggccttttgctggccttttgctcacatgttctttcctgcgttatcccctgattctgtggataaccgtattaccgcctttgagtgagctgataccgctcgccgcagccgaacgaccgagcgcagcgagtcagtgagcgaggaagcggaagagcgcctgatgcggtattttctccttacgcatctgtgcggtatttcacaccgcatatatggtgcactctcagtacaatctgctctgatgccgcatagttaagccagtatacactccgctatcgctacgtgactgggtcatggctgcgccccgacacccgccaacacccgctgacgcgccctgacgggcttgtctgctcccggcatccgcttacagacaagctgtgaccgtctccgggagctgcatgtgtcagaggttttcaccgtcatcaccgaaacgcgcgaggcagctgcggtaaagctcatcagcgtggtcgtgaagcgattcacagatgtctgcctgttcatccgcgtccagctcgttgagtttctccagaagcgttaatgtctggcttctgataaagcgggccatgttaagggcggttttttcctgtttggtcactgatgcctccgtgtaagggggatttctgttcatgggggtaatgataccgatgaaacgagagaggatgctcacgatacgggttactgatgatgaacatgcccggttactggaacgttgtgagggtaaacaactggcggtatggatgcggcgggaccagagaaaaatcactcagggtcaatgccagcgcttcgttaatacagatgtaggtgttccacagggtagccagcagcatcctgcgatgcagatccggaacataatggtgcagggcgctgacttccgcgtttccagactttacgaaacacggaaaccgaagaccattcatgttgttgctcaggtcgcagacgttttgcagcagcagtcgcttcacgttcgctcgcgtatcggtgattcattctgctaaccagtaaggcaaccccgccagcctagccgggtcctcaacgacaggagcacgatcatgcgcacccgtggccaggacccaacgctgcccgagatgcgccgcgtgcggctgctggagatggcggacgcgatggatatgttctgccaagggttggtttgcgcattcacagttctccgcaagaattgattggctccaattcttggagtggtgaatccgttagcgaggtgccgccggcttccattcaggtcgaggtggcccggctccatgcaccgcgacgcaacgcggggaggcagacaaggtatagggcggcgcctacaatccatgccaacccgttccatgtgctcgccgaggcggcataaatcgccgtgacgatcagcggtccagtgatcgaagttaggctggtaagagccgcgagcgatccttgaagctgtccctgatggtcgtcatctacctgcctggacagcatggcctgcaacgcgggcatcccgatgccgccggaagcgagaagaatcataatggggaaggccatccagcctcgcgtcgcgaacgccagcaagacgtagcccagcgcgtcggccgccatgccggcgataatggcctgcttctcgccgaaacgtttggtggcgggaccagtgacgaaggcttgagcgagggcgtgcaagattccgaataccgcaagcgacaggccgatcatcgtcgcgctccagcgaaagcggtcctcgccgaaaatgacccagagcgctgccggcacctgtcctacgagttgcatgataaagaagacagtcataagtgcggcgacgatagtcatgccccgcgcccaccggaaggagctgactgggttgaaggctctcaagggcatcggtcgagatcccggtgcctaatgagtgagctaacttacattaattgcgttgcgctcactgcccgctttccagtcgggaaacctgtcgtgccagctgcattaatgaatcggccaacgcgcggggagaggcggtttgcgtattgggcgccagggtggtttttcttttcaccagtgagacgggcaacagctgattgcccttcaccgcctggccctgagagagttgcagcaagcggtccacgctggtttgccccagcaggcgaaaatcctgtttgatggtggttaacggcgggatataacatgagctgtcttcggtatcgtcgtatcccactaccgagatatccgcaccaacgcgcagcccggactcggtaatggcgcgcattgcgcccagcgccatctgatcgttggcaaccagcatcgcagtgggaacgatgccctcattcagcatttgcatggtttgttgaaaaccggacatggcactccagtcgccttcccgttccgctatcggctgaatttgattgcgagtgagatatttatgccagccagccagacgcagacgcgccgagacagaacttaatgggcccgctaacagcgcgatttgctggtgacccaatgcgaccagatgctccacgcccagtcgcgtaccgtcttcatgggagaaaataatactgttgatgggtgtc

SEQ ID NO: 147 - protein, 171 aa, Serratia entomophila
MPYSSESKEKETHSKETERDNADPVFQRVSQGGVGVSPPDEGGDLSAGSNNDHLFAFIRETHLEEAQEFRLKGYNSQVPEVDEGLLTQLRDDLAAAKSRQYVQASVGGPLGSRWLLEQIGKIERLTDKFSDEVIKRWVKHELPRKNVGEAAGTELGSRRRAQSLARRLEST

SEQ ID NO: 148 - DNA, 6439 bp, Serratia entomophila
  source 1..6439: mol_type = other DNA
  CDS 933..1595: note = Afp18 C7 terminal truncation R220
tggtcagagacatcaagaaataacgccggaacattagtgcaggcagcttccacagcaatggcatcctggtcatccagcggatagttaatgatcagcccactgacgcgttgcgcgagaagattgtgcaccgccgctttacaggcttcgacgccgcttcgttctaccatcgacaccaccacgctggcacccagttgatcggcgcgagatttaatcgccgcgacaatttgcgacggcgcgtgcagggccagactggaggtggcaacgccaatcagcaacgactgtttgcccgccagttgttgtgccacgcggttgggaatgtaattcagctccgccatcgccgcttccactttttcccgcgttttcgcagaaacgtggctggcctggttcaccacgcgggaaacggtctgataagagacaccggcatactctgcgacatcgtataacgttactggtttcacattcaccaccctgaattgactctcttccgggcgctatcatgccataccgcgaaaggttttgcgccattcgatggtgtccgggatctcgacgctctcccttatgcgactcctgcattaggaagcagcccagtagtaggttgaggccgttgagcaccgccgccgcaaggaatggtgcatgcaaggagatggcgcccaacagtcccccggccacggggcctgccaccatacccacgccgaaacaagcgctcatgagcccgaagtggcgagcccgatcttccccatcggtgatgtcggcgatataggcgccagcaaccgcacctgtggcgccggtgatgccggccacgatgcgtccggcgtagaggatcgagatctcgatcccgcgaaattaatacgactcactataggggaattgtgagcggataacaattcccctctagaaataattttgtttaactttaagaaggagatatacatatgccttactccagtgagtcgaaggaaaaagaaacacactcaaaagaaaccgaaagagataatgctgacccagtatttcaacgggtcagccagggcggcgtgggtgtttcaccgcctgatgaggggggagacttgtcggccggaagtaacaatgaccatttattcgcttttattcgtgaaacacacttggaagaagcccaggaattcaggctaaaagggtataacagccaggtgcccgaggttgacgagggattactgacgcagctgcgtgacgacctggcggcggccaaatcccgccagtacgttcaggcaagcgttggggggccgctgggttctcggtggctgctggaacagataggcaaaatagagcggctgacggacaagttttctgacgaagtaataaaacgctgggttaagcatgagctgccacgaaaaaacgtaggggaagccgcggggaccgagttggggagccggcgtagggctcagtcgctggccagacggttggagtcaaccatgcagacactgatccgcgttgtccataccctgcatgctatggatgactacagtaccccggaaaaacggcacgacatgctggtcgctgagcttaccggcgcgttctcctccagtgataaaaatacggtgatacaggcgctggggagataaggtacccttgaggtgctgtttcagggaccaggaggtagtggatctgcttggagccatccacagttcgaaaaaggtggaggttctggcggtggatcaggtggaagtgcatggtctcaccctcagtttgagaaataaggatccggctgctaacaaagcccgaaaggaagctgagttggctgctgccaccgctgagcaataactagcataaccccttggggcctctaaacgggtcttgaggggttttttgctgaaaggaggaactatatccggatatcccgcaagaggcccggcagtaccggcataaccaagcctatgcctacagcatccagggtgacggtgccgaggatgacgatgagcgcattgttagatttcatacacggtgcctgactgcgttagcaatttaactgtgataaactaccgcattaaagcttatcgatgataagctgtcaaacatgagaattcttgaagacgaaagggcctcgtgatacgcctatttttataggttaatgtcatgataataatggtttcttagacgtcaggtggcacttttcggggaaatgtgcgcggaacccctatttgtttatttttctaaatacattcaaatatgtatccgctcatgagacaataaccctgataaatgcttcaataatattgaaaaaggaagagtatgagtattcaacatttccgtgtcgcccttattcccttttttgcggcattttgccttcctgtttttgctcacccagaaacgctggtgaaagtaaaagatgctgaagatcagttgggtgcacgagtgggttacatcgaactggatctcaacagcggtaagatccttgagagttttcgccccgaagaacgttttccaatgatgagcacttttaaagttctgctatgtggcgcggtattatcccgtgttgacgccgggcaagagcaactcggtcgccgcatacactattctcagaatgacttggttgagtactcaccagtcacagaaaagcatcttacggatggcatgacagtaagagaattatgcagtgctgccataaccatgagtgataacactgcggccaacttacttctgacaacgatcggaggaccgaaggagctaaccgcttttttgcacaacatgggggatcatgtaactcgccttgatcgttgggaaccggagctgaatgaagccataccaaacgacgagcgtgacaccacgatgcctgcagcaatggcaacaacgttgcgcaaactattaactggcgaactacttactctagcttcccggcaacaattaatagactggatggaggcggataaagttgcaggaccacttctgcgctcggcccttccggctggctggtttattgctgataaatctggagccggtgagcgtgggtctcgcggtatcattgcagcactggggccagatggtaagccctcccgtatcgtagttatctacacgacggggagtcaggcaactatggatgaacgaaatagacagatcgctgagataggtgcctcactgattaagcattggtaactgtcagaccaagtttactcatatatactttagattgatttaaaacttcatttttaatttaaaaggatctaggtgaagatcctttttgataatctcatgaccaaaatcccttaacgtgagttttcgttccactgagcgtcagaccccgtagaaaagatcaaaggatcttcttgagatcctttttttctgcgcgtaatctgctgcttgcaaacaaaaaaaccaccgctaccagcggtggtttgtttgccggatcaagagctaccaactctttttccgaaggtaactggcttcagcagagcgcagataccaaatactgtccttctagtgtagccgtagttaggccaccacttcaagaactctgtagcaccgcctacatacctcgctctgctaatcctgttaccagtggctgctgccagtggcgataagtcgtgtcttaccgggttggactcaagacgatagttaccggataaggcgcagcggtcgggctgaacggggggttcgtgcacacagcccagcttggagcgaacgacctacaccgaactgagatacctacagcgtgagctatgagaaagcgccacgcttcccgaagggagaaaggcggacaggtatccggtaagcggcagggtcggaacaggagagcgcacgagggagcttccagggggaaacgcctggtatctttatagtcctgtcgggtttcgccacctctgacttgagcgtcgatttttgtgatgctcgtcaggggggcggagcctatggaaaaacgccagcaacgcggcctttttacggttcctggccttttgctggccttttgctcacatgttctttcctgcgttatcccctgattctgtggataaccgtattaccgcctttgagtgagctgataccgctcgccgcagccgaacgaccgagcgcagcgagtcagtgagcgaggaagcggaagagcgcctgatgcggtattttctccttacgcatctgtgcggtatttcacaccgcatatatggtgcactctcagtacaatctgctctgatgccgcatagttaagccagtatacactccgctatcgctacgtgactgggtcatggctgcgccccgacacccgccaacacccgctgacgcgccctgacgggcttgtctgctcccggcatccgcttacagacaagctgtgaccgtctccgggagctgcatgtgtcagaggttttcaccgtcatcaccgaaacgcgcgaggcagctgcggtaaagctcatcagcgtggtcgtgaagcgattcacagatgtctgcctgttcatccgcgtccagctcgttgagtttctccagaagcgttaatgtctggcttctgataaagcgggccatgttaagggcggttttttcctgtttggtcactgatgcctccgtgtaagggggatttctgttcatgggggtaatgataccgatgaaacgagagaggatgctcacgatacgggttactgatgatgaacatgcccggttactggaacgttgtgagggtaaacaactggcggtatggatgcggcgggaccagagaaaaatcactcagggtcaatgccagcgcttcgttaatacagatgtaggtgttccacagggtagccagcagcatcctgcgatgcagatccggaacataatggtgcagggcgctgacttccgcgtttccagactttacgaaacacggaaaccgaagaccattcatgttgttgctcaggtcgcagacgttttgcagcagcagtcgcttcacgttcgctcgcgtatcggtgattcattctgctaaccagtaaggcaaccccgccagcctagccgggtcctcaacgacaggagcacgatcatgcgcacccgtggccaggacccaacgctgcccgagatgcgccgcgtgcggctgctggagatggcggacgcgatggatatgttctgccaagggttggtttgcgcattcacagttctccgcaagaattgattggctccaattcttggagtggtgaatccgttagcgaggtgccgccggcttccattcaggtcgaggtggcccggctccatgcaccgcgacgcaacgcggggaggcagacaaggtatagggcggcgcctacaatccatgccaacccgttccatgtgctcgccgaggcggcataaatcgccgtgacgatcagcggtccagtgatcgaagttaggctggtaagagccgcgagcgatccttgaagctgtccctgatggtcgtcatctacctgcctggacagcatggcctgcaacgcgggcatcccgatgccgccggaagcgagaagaatcataatggggaaggccatccagcctcgcgtcgcgaacgccagcaagacgtagcccagcgcgtcggccgccatgccggcgataatggcctgcttctcgccgaaacgtttggtggcgggaccagtgacgaaggcttgagcgagggcgtgcaagattccgaataccgcaagcgacaggccgatcatcgtcgcgctccagcgaaagcggtcctcgccgaaaatgacccagagcgctgccggcacctgtcctacgagttgcatgataaagaagacagtcataagtgcggcgacgatagtcatgccccgcgcccaccggaaggagctgactgggttgaaggctctcaagggcatcggtcgagatcccggtgcctaatgagtgagctaacttacattaattgcgttgcgctcactgcccgctttccagtcgggaaacctgtcgtgccagctgcattaatgaatcggccaacgcgcggggagaggcggtttgcgtattgggcgccagggtggtttttcttttcaccagtgagacgggcaacagctgattgcccttcaccgcctggccctgagagagttgcagcaagcggtccacgctggtttgccccagcaggcgaaaatcctgtttgatggtggttaacggcgggatataacatgagctgtcttcggtatcgtcgtatcccactaccgagatatccgcaccaacgcgcagcccggactcggtaatggcgcgcattgcgcccagcgccatctgatcgttggcaaccagcatcgcagtgggaacgatgccctcattcagcatttgcatggtttgttgaaaaccggacatggcactccagtcgccttcccgttccgctatcggctgaatttgattgcgagtgagatatttatgccagccagccagacgcagacgcgccgagacagaacttaatgggcccgctaacagcgcgatttgctggtgacccaatgcgaccagatgctccacgcccagtcgcgtaccgtcttcatgggagaaaataatactgttgatgggtgtc

SEQ ID NO: 149 - protein, 220 aa, Serratia entomophila
MPYSSESKEKETHSKETERDNADPVFQRVSQGGVGVSPPDEGGDLSAGSNNDHLFAFIRETHLEEAQEFRLKGYNSQVPEVDEGLLTQLRDDLAAAKSRQYVQASVGGPLGSRWLLEQIGKIERLTDKFSDEVIKRWVKHELPRKNVGEAAGTELGSRRRAQSLARRLESTMQTLIRVVHTLHAMDDYSTPEKRHDMLVAELTGAFSSSDKNTVIQALGR

SEQ ID NO: 150 - DNA, 8563 bp, Serratia entomophila
  source 1..8563: mol_type = other DNA
  CDS 933..1445: note = Afp18-C8 C-terminal truncation T171
  CDS 1446..3719: note = Casphi2 codon optimized
tggtcagagacatcaagaaataacgccggaacattagtgcaggcagcttccacagcaatggcatcctggtcatccagcggatagttaatgatcagcccactgacgcgttgcgcgagaagattgtgcaccgccgctttacaggcttcgacgccgcttcgttctaccatcgacaccaccacgctggcacccagttgatcggcgcgagatttaatcgccgcgacaatttgcgacggcgcgtgcagggccagactggaggtggcaacgccaatcagcaacgactgtttgcccgccagttgttgtgccacgcggttgggaatgtaattcagctccgccatcgccgcttccactttttcccgcgttttcgcagaaacgtggctggcctggttcaccacgcgggaaacggtctgataagagacaccggcatactctgcgacatcgtataacgttactggtttcacattcaccaccctgaattgactctcttccgggcgctatcatgccataccgcgaaaggttttgcgccattcgatggtgtccgggatctcgacgctctcccttatgcgactcctgcattaggaagcagcccagtagtaggttgaggccgttgagcaccgccgccgcaaggaatggtgcatgcaaggagatggcgcccaacagtcccccggccacggggcctgccaccatacccacgccgaaacaagcgctcatgagcccgaagtggcgagcccgatcttccccatcggtgatgtcggcgatataggcgccagcaaccgcacctgtggcgccggtgatgccggccacgatgcgtccggcgtagaggatcgagatctcgatcccgcgaaattaatacgactcactataggggaattgtgagcggataacaattcccctctagaaataattttgtttaactttaagaaggagatatacatatgccttactccagtgagtcgaaggaaaaagaaacacactcaaaagaaaccgaaagagataatgctgacccagtatttcaacgggtcagccagggcggcgtgggtgtttcaccgcctgatgaggggggagacttgtcggccggaagtaacaatgaccatttattcgcttttattcgtgaaacacacttggaagaagcccaggaattcaggctaaaagggtataacagccaggtgcccgaggttgacgagggattactgacgcagctgcgtgacgacctggcggcggccaaatcccgccagtacgttcaggcaagcgttggggggccgctgggttctcggtggctgctggaacagataggcaaaatagagcggctgacggacaagttttctgacgaagtaataaaacgctgggttaagcatgagctgccacgaaaaaacgtaggggaagccgcggggaccgagttggggagccggcgtagggctcagtcgctggccagacggttggagtcaaccatgccgaaaccggcggtggaaagcgaatttagcaaagtgctgaaaaaacattttccgggcgaacgctttcgcagcagctatatgaaacgcggcggcaaaattctggcggcgcagggcgaagaagcggtggtggcgtatctgcagggcaaaagcgaagaagaaccgccgaactttcagccgccggcgaaatgccatgtggtgaccaaaagccgcgattttgcggaatggccgattatgaaagcgagcgaagcgattcagcgctatatttatgcgctgagcaccaccgaacgcgcggcgtgcaaaccgggcaaaagcagcgaaagccatgcggcgtggtttgcggcgaccggcgtgagcaaccatggctatagccatgtgcagggcctgaacctgatttttgatcataccctgggccgctatgatggcgtgctgaaaaaagtgcagctgcgcaacgaaaaagcgcgcgcgcgcctggaaagcattaacgcgagccgcgcggatgaaggcctgccggaaattaaagcggaagaagaagaagtggcgaccaacgaaaccggccatctgctgcagccgccgggcattaacccgagcttttatgtgtatcagaccattagcccgcaggcgtatcgcccgcgcgatgaaattgtgctgccgccggaatatgcgggctatgtgcgcgatccgaacgcgccgattccgctgggcgtggtgcgcaaccgctgcgatattcagaaaggctgcccgggctatattccggaatggcagcgcgaagcgggcaccgcgattagcccgaaaaccggcaaagcggtgaccgtgccgggcctgagcccgaaaaaaaacaaacgcatgcgccgctattggcgcagcgaaaaagaaaaagcgcaggatgcgctgctggtgaccgtgcgcattggcaccgattgggtggtgattgatgtgcgcggcctgctgcgcaacgcgcgctggcgcaccattgcgccgaaagatattagcctgaacgcgctgctggatctgtttaccggcgatccggtgattgatgtgcgccgcaacattgtgacctttacctataccctggatgcgtgcggcacctatgcgcgcaaatggaccctgaaaggcaaacagaccaaagcgaccctggataaactgaccgcgacccagaccgtggcgctggtggcgattgatctgggccagaccaacccgattagcgcgggcattagccgcgtgacccaggaaaacggcgcgctgcagtgcgaaccgctggatcgctttaccctgccggatgatctgctgaaagatattagcgcgtatcgcattgcgtgggatcgcaacgaagaagaactgcgcgcgcgcagcgtggaagcgctgccggaagcgcagcaggcggaagtgcgcgcgctggatggcgtgagcaaagaaaccgcgcgcacccagctgtgcgcggattttggcctggatccgaaacgcctgccgtgggataaaatgagcagcaacaccacctttattagcgaagcgctgctgagcaacagcgtgagccgcgatcaggtgttttttaccccggcgccgaaaaaaggcgcgaaaaaaaaagcgccggtggaagtgatgcgcaaagatcgcacctgggcgcgcgcgtataaaccgcgcctgagcgtggaagcgcagaaactgaaaaacgaagcgctgtgggcgctgaaacgcaccagcccggaatatctgaaactgagccgccgcaaagaagaactgtgccgccgcagcattaactatgtgattgaaaaaacccgccgccgcacccagtgccagattgtgattccggtgattgaagatctgaacgtgcgcttttttcatggcagcggcaaacgcctgccgggctgggataacttttttaccgcgaaaaaagaaaaccgctggtttattcagggcctgcataaagcgtttagcgatctgcgcacccatcgcagcttttatgtgtttgaagtgcgcccggaacgcaccagcattacctgcccgaaatgcggccattgcgaagtgggcaaccgcgatggcgaagcgtttcagtgcctgagctgcggcaaaacctgcaacgcggatctggatgtggcgacccataacctgacccaggtggcgctgaccggcaaaaccatgccgaaacgcgaagaaccgcgcgatgcgcagggcaccgcgccggcgcgcaaaaccaaaaaagcgagcaaaagcaaagcgccgccggcggaacgcgaagatcagaccccggcgcaggaaccgagccagaccagctaaggtacccttgaggtgctgtttcagggaccaggaggtagtggatctgcttggagccatccacagttcgaaaaaggtggaggttctggcggtggatcaggtggaagtgcatggtctcaccctcagtttgagaaataaggatccggctgctaacaaagcccgaaaggaagctgagttggctgctgccaccgctgagcaataactagcataaccccttggggcctctaaacgggtcttgaggggttttttgctgaaaggaggaactatatccggatatcccgcaagaggcccggcagtaccggcataaccaagcctatgcctacagcatccagggtgacggtgccgaggatgacgatgagcgcattgttagatttcatacacggtgcctgactgcgttagcaatttaactgtgataaactaccgcattaaagcttatcgatgataagctgtcaaacatgagaattcttgaagacgaaagggcctcgtgatacgcctatttttataggttaatgtcatgataataatggtttcttagacgtcaggtggcacttttcggggaaatgtgcgcggaacccctatttgtttatttttctaaatacattcaaatatgtatccgctcatgagacaataaccctgataaatgcttcaataatattgaaaaaggaagagtatgagtattcaacatttccgtgtcgcccttattcccttttttgcggcattttgccttcctgtttttgctcacccagaaacgctggtgaaagtaaaagatgctgaagatcagttgggtgcacgagtgggttacatcgaactggatctcaacagcggtaagatccttgagagttttcgccccgaagaacgttttccaatgatgagcacttttaaagttctgctatgtggcgcggtattatcccgtgttgacgccgggcaagagcaactcggtcgccgcatacactattctcagaatgacttggttgagtactcaccagtcacagaaaagcatcttacggatggcatgacagtaagagaattatgcagtgctgccataaccatgagtgataacactgcggccaacttacttctgacaacgatcggaggaccgaaggagctaaccgcttttttgcacaacatgggggatcatgtaactcgccttgatcgttgggaaccggagctgaatgaagccataccaaacgacgagcgtgacaccacgatgcctgcagcaatggcaacaacgttgcgcaaactattaactggcgaactacttactctagcttcccggcaacaattaatagactggatggaggcggataaagttgcaggaccacttctgcgctcggcccttccggctggctggtttattgctgataaatctggagccggtgagcgtgggtctcgcggtatcattgcagcactggggccagatggtaagccctcccgtatcgtagttatctacacgacggggagtcaggcaactatggatgaacgaaatagacagatcgctgagataggtgcctcactgattaagcattggtaactgtcagaccaagtttactcatatatactttagattgatttaaaacttcatttttaatttaaaaggatctaggtgaagatcctttttgataatctcatgaccaaaatcccttaacgtgagttttcgttccactgagcgtcagaccccgtagaaaagatcaaaggatcttcttgagatcctttttttctgcgcgtaatctgctgcttgcaaacaaaaaaaccaccgctaccagcggtggtttgtttgccggatcaagagctaccaactctttttccgaaggtaactggcttcagcagagcgcagataccaaatactgtccttctagtgtagccgtagttaggccaccacttcaagaactctgtagcaccgcctacatacctcgctctgctaatcctgttaccagtggctgctgccagtggcgataagtcgtgtcttaccgggttggactcaagacgatagttaccggataaggcgcagcggtcgggctgaacggggggttcgtgcacacagcccagcttggagcgaacgacctacaccgaactgagatacctacagcgtgagctatgagaaagcgccacgcttcccgaagggagaaaggcggacaggtatccggtaagcggcagggtcggaacaggagagcgcacgagggagcttccagggggaaacgcctggtatctttatagtcctgtcgggtttcgccacctctgacttgagcgtcgatttttgtgatgctcgtcaggggggcggagcctatggaaaaacgccagcaacgcggcctttttacggttcctggccttttgctggccttttgctcacatgttctttcctgcgttatcccctgattctgtggataaccgtattaccgcctttgagtgagctgataccgctcgccgcagccgaacgaccgagcgcagcgagtcagtgagcgaggaagcggaagagcgcctgatgcggtattttctccttacgcatctgtgcggtatttcacaccgcatatatggtgcactctcagtacaatctgctctgatgccgcatagttaagccagtatacactccgctatcgctacgtgactgggtcatggctgcgccccgacacccgccaacacccgctgacgcgccctgacgggcttgtctgctcccggcatccgcttacagacaagctgtgaccgtctccgggagctgcatgtgtcagaggttttcaccgtcatcaccgaaacgcgcgaggcagctgcggtaaagctcatcagcgtggtcgtgaagcgattcacagatgtctgcctgttcatccgcgtccagctcgttgagtttctccagaagcgttaatgtctggcttctgataaagcgggccatgttaagggcggttttttcctgtttggtcactgatgcctccgtgtaagggggatttctgttcatgggggtaatgataccgatgaaacgagagaggatgctcacgatacgggttactgatgatgaacatgcccggttactggaacgttgtgagggtaaacaactggcggtatggatgcggcgggaccagagaaaaatcactcagggtcaatgccagcgcttcgttaatacagatgtaggtgttccacagggtagccagcagcatcctgcgatgcagatccggaacataatggtgcagggcgctgacttccgcgtttccagactttacgaaacacggaaaccgaagaccattcatgttgttgctcaggtcgcagacgttttgcagcagcagtcgcttcacgttcgctcgcgtatcggtgattcattctgctaaccagtaaggcaaccccgccagcctagccgggtcctcaacgacaggagcacgatcatgcgcacccgtggccaggacccaacgctgcccgagatgcgccgcgtgcggctgctggagatggcggacgcgatggatatgttctgccaagggttggtttgcgcattcacagttctccgcaagaattgattggctccaattcttggagtggtgaatccgttagcgaggtgccgccggcttccattcaggtcgaggtggcccggctccatgcaccgcgacgcaacgcggggaggcagacaaggtatagggcggcgcctacaatccatgccaacccgttccatgtgctcgccgaggcggcataaatcgccgtgacgatcagcggtccagtgatcgaagttaggctggtaagagccgcgagcgatccttgaagctgtccctgatggtcgtcatctacctgcctggacagcatggcctgcaacgcgggcatcccgatgccgccggaagcgagaagaatcataatggggaaggccatccagcctcgcgtcgcgaacgccagcaagacgtagcccagcgcgtcggccgccatgccggcgataatggcctgcttctcgccgaaacgtttggtggcgggaccagtgacgaaggcttgagcgagggcgtgcaagattccgaataccgcaagcgacaggccgatcatcgtcgcgctccagcgaaagcggtcctcgccgaaaatgacccagagcgctgccggcacctgtcctacgagttgcatgataaagaagacagtcataagtgcggcgacgatagtcatgccccgcgcccaccggaaggagctgactgggttgaaggctctcaagggcatcggtcgagatcccggtgcctaatgagtgagctaacttacattaattgcgttgcgctcactgcccgctttccagtcgggaaacctgtcgtgccagctgcattaatgaatcggccaacgcgcggggagaggcggtttgcgtattgggcgccagggtggtttttcttttcaccagtgagacgggcaacagctgattgcccttcaccgcctggccctgagagagttgcagcaagcggtccacgctggtttgccccagcaggcgaaaatcctgtttgatggtggttaacggcgggatataacatgagctgtcttcggtatcgtcgtatcccactaccgagatatccgcaccaacgcgcagcccggactcggtaatggcgcgcattgcgcccagcgccatctgatcgttggcaaccagcatcgcagtgggaacgatgccctcattcagcatttgcatggtttgttgaaaaccggacatggcactccagtcgccttcccgttccgctatcggctgaatttgattgcgagtgagatatttatgccagccagccagacgcagacgcgccgagacagaacttaatgggcccgctaacagcgcgatttgctggtgacccaatgcgaccagatgctccacgcccagtcgcgtaccgtcttcatgggagaaaataatactgttgatgggtgtc

SEQ ID NO: 151 - protein, 171 aa, Serratia entomophila; identical to SEQ ID NO: 147

SEQ ID NO: 152 - protein, 757 aa, Serratia entomophila; identical to SEQ ID NO: 99

SEQ ID NO: 153 - DNA, 8353 bp, Serratia entomophila
  source 1..8353: mol_type = other DNA
  CDS 933..1445: note = SEAfp18-C8 C-terminal truncation T171
  CDS 1446..3509: note = Pseudomonas aeruginosa Type III Secrection System Effector ExoU
tggtcagagacatcaagaaataacgccggaacattagtgcaggcagcttccacagcaatggcatcctggtcatccagcggatagttaatgatcagcccactgacgcgttgcgcgagaagattgtgcaccgccgctttacaggcttcgacgccgcttcgttctaccatcgacaccaccacgctggcacccagttgatcggcgcgagatttaatcgccgcgacaatttgcgacggcgcgtgcagggccagactggaggtggcaacgccaatcagcaacgactgtttgcccgccagttgttgtgccacgcggttgggaatgtaattcagctccgccatcgccgcttccactttttcccgcgttttcgcagaaacgtggctggcctggttcaccacgcgggaaacggtctgataagagacaccggcatactctgcgacatcgtataacgttactggtttcacattcaccaccctgaattgactctcttccgggcgctatcatgccataccgcgaaaggttttgcgccattcgatggtgtccgggatctcgacgctctcccttatgcgactcctgcattaggaagcagcccagtagtaggttgaggccgttgagcaccgccgccgcaaggaatggtgcatgcaaggagatggcgcccaacagtcccccggccacggggcctgccaccatacccacgccgaaacaagcgctcatgagcccgaagtggcgagcccgatcttccccatcggtgatgtcggcgatataggcgccagcaaccgcacctgtggcgccggtgatgccggccacgatgcgtccggcgtagaggatcgagatctcgatcccgcgaaattaatacgactcactataggggaattgtgagcggataacaattcccctctagaaataattttgtttaactttaagaaggagatatacatatgccttactccagtgagtcgaaggaaaaagaaacacactcaaaagaaaccgaaagagataatgctgacccagtatttcaacgggtcagccagggcggcgtgggtgtttcaccgcctgatgaggggggagacttgtcggccggaagtaacaatgaccatttattcgcttttattcgtgaaacacacttggaagaagcccaggaattcaggctaaaagggtataacagccaggtgcccgaggttgacgagggattactgacgcagctgcgtgacgacctggcggcggccaaatcccgccagtacgttcaggcaagcgttggggggccgctgggttctcggtggctgctggaacagataggcaaaatagagcggctgacggacaagttttctgacgaagtaataaaacgctgggttaagcatgagctgccacgaaaaaacgtaggggaagccgcggggaccgagttggggagccggcgtagggctcagtcgctggccagacggttggagtcaaccatgcatattcagagcctgggcgcgaccgcgagcagcctgaaccaggaaccggtggaaaccccgagccaggcggcgcataaaagcgcgagcctgcgccaggaaccgagcggccagggcctgggcgtggcgctgaaaagcaccccgggcattctgagcggcaaactgccggaaagcgtgagcgatgtgcgctttagcagcccgcagggccagggcgaaagccgcaccctgaccgatagcgcgggcccgcgccagattaccctgcgccagtttgaaaacggcgtgaccgaactgcagctgagccgcccgccgctgaccagcctggtgctgagcggcggcggcgcgaaaggcgcggcgtatccgggcgcgatgctggcgctggaagaaaaaggcatgctggatggcattcgcagcatgagcggcagcagcgcgggcggcattaccgcggcgctgctggcgagcggcatgagcccggcggcgtttaaaaccctgagcgataaaatggatctgattagcctgctggatagcagcaacaaaaaactgaaactgtttcagcatattagcagcgaaattggcgcgagcctgaaaaaaggcctgggcaacaaaattggcggctttagcgaactgctgctgaacgtgctgccgcgcattgatagccgcgcggaaccgctggaacgcctgctgcgcgatgaaacccgcaaagcggtgctgggccagattgcgacccatccggaagtggcgcgccagccgaccgtggcggcgattgcgagccgcctgcagagcggcagcggcgtgacctttggcgatctggatcgcctgagcgcgtatattccgcagattaaaaccctgaacattaccggcaccgcgatgtttgaaggccgcccgcagctggtggtgtttaacgcgagccataccccggatctggaagtggcgcaggcggcgcatattagcggcagctttccgggcgtgtttcagaaagtgagcctgagcgatcagccgtatcaggcgggcgtggaatggaccgaatttcaggatggcggcgtgatgattaacgtgccggtgccggaaatgattgataaaaactttgatagcggcccgctgcgccgcaacgataacctgattctggaatttgaaggcgaagcgggcgaagtggcgccggatcgcggcacccgcggcggcgcgctgaaaggctgggtggtgggcgtgccggcgctgcaggcgcgcgaaatgctgcagctggaaggcctggaagaactgcgcgaacagaccgtggtggtgccgctgaaaagcgaacgcggcgattttagcggcatgctgggcggcaccctgaactttaccatgccggatgaaattaaagcgcatctgcaggaacgcctgcaggaacgcgtgggcgaacatctggaaaaacgcctgcaggcgagcgaacgccatacctttgcgagcctggatgaagcgctgctggcgctggatgatagcatgctgaccagcgtggcgcagcagaacccggaaattaccgatggcgcggtggcgtttcgccagaaagcgcgcgatgcgtttaccgaactgaccgtggcgattgtgagcgcgaacggcctggcgggccgcctgaaactggatgaagcgatgcgcagcgcgctgcagcgcctggatgcgctggcggataccccggaacgcctggcgtggctggcggcggaactgaaccatgcggataacgtggatcatcagcagctgctggatgcgatgcgcggccagaccgtgcagagcccggtgctggcggcggcgctggcggaagcgcagcgccgcaaagtggcggtgattgcggaaaacattcgcaaagaagtgatttttccgagcctgtatcgcccgggccagccggatagcaacgtggcgctgctgcgccgcgcggaagaacagctgcgccatgcgaccagcccggcggaaattaaccaggcgctgaacgatattgtggataactatagcgcgcgcggctttctgcgctttggcaaaccgctgagcagcaccaccgtggaaatggcgaaagcgtggcgcaacaaagaatttacctaaggtacccttgaggtgctgtttcagggaccaggaggtagtggatctgcttggagccatccacagttcgaaaaaggtggaggttctggcggtggatcaggtggaagtgcatggtctcaccctcagtttgagaaataaggatccggctgctaacaaagcccgaaaggaagctgagttggctgctgccaccgctgagcaataactagcataaccccttggggcctctaaacgggtcttgaggggttttttgctgaaaggaggaactatatccggatatcccgcaagaggcccggcagtaccggcataaccaagcctatgcctacagcatccagggtgacggtgccgaggatgacgatgagcgcattgttagatttcatacacggtgcctgactgcgttagcaatttaactgtgataaactaccgcattaaagcttatcgatgataagctgtcaaacatgagaattcttgaagacgaaagggcctcgtgatacgcctatttttataggttaatgtcatgataataatggtttcttagacgtcaggtggcacttttcggggaaatgtgcgcggaacccctatttgtttatttttctaaatacattcaaatatgtatccgctcatgagacaataaccctgataaatgcttcaataatattgaaaaaggaagagtatgagtattcaacatttccgtgtcgcccttattcccttttttgcggcattttgccttcctgtttttgctcacccagaaacgctggtgaaagtaaaagatgctgaagatcagttgggtgcacgagtgggttacatcgaactggatctcaacagcggtaagatccttgagagttttcgccccgaagaacgttttccaatgatgagcacttttaaagttctgctatgtggcgcggtattatcccgtgttgacgccgggcaagagcaactcggtcgccgcatacactattctcagaatgacttggttgagtactcaccagtcacagaaaagcatcttacggatggcatgacagtaagagaattatgcagtgctgccataaccatgagtgataacactgcggccaacttacttctgacaacgatcggaggaccgaaggagctaaccgcttttttgcacaacatgggggatcatgtaactcgccttgatcgttgggaaccggagctgaatgaagccataccaaacgacgagcgtgacaccacgatgcctgcagcaatggcaacaacgttgcgcaaactattaactggcgaactacttactctagcttcccggcaacaattaatagactggatggaggcggataaagttgcaggaccacttctgcgctcggcccttccggctggctggtttattgctgataaatctggagccggtgagcgtgggtctcgcggtatcattgcagcactggggccagatggtaagccctcccgtatcgtagttatctacacgacggggagtcaggcaactatggatgaacgaaatagacagatcgctgagataggtgcctcactgattaagcattggtaactgtcagaccaagtttactcatatatactttagattgatttaaaacttcatttttaatttaaaaggatctaggtgaagatcctttttgataatctcatgaccaaaatcccttaacgtgagttttcgttccactgagcgtcagaccccgtagaaaagatcaaaggatcttcttgagatcctttttttctgcgcgtaatctgctgcttgcaaacaaaaaaaccaccgctaccagcggtggtttgtttgccggatcaagagctaccaactctttttccgaaggtaactggcttcagcagagcgcagataccaaatactgtccttctagtgtagccgtagttaggccaccacttcaagaactctgtagcaccgcctacatacctcgctctgctaatcctgttaccagtggctgctgccagtggcgataagtcgtgtcttaccgggttggactcaagacgatagttaccggataaggcgcagcggtcgggctgaacggggggttcgtgcacacagcccagcttggagcgaacgacctacaccgaactgagatacctacagcgtgagctatgagaaagcgccacgcttcccgaagggagaaaggcggacaggtatccggtaagcggcagggtcggaacaggagagcgcacgagggagcttccagggggaaacgcctggtatctttatagtcctgtcgggtttcgccacctctgacttgagcgtcgatttttgtgatgctcgtcaggggggcggagcctatggaaaaacgccagcaacgcggcctttttacggttcctggccttttgctggccttttgctcacatgttctttcctgcgttatcccctgattctgtggataaccgtattaccgcctttgagtgagctgataccgctcgccgcagccgaacgaccgagcgcagcgagtcagtgagcgaggaagcggaagagcgcctgatgcggtattttctccttacgcatctgtgcggtatttcacaccgcatatatggtgcactctcagtacaatctgctctgatgccgcatagttaagccagtatacactccgctatcgctacgtgactgggtcatggctgcgccccgacacccgccaacacccgctgacgcgccctgacgggcttgtctgctcccggcatccgcttacagacaagctgtgaccgtctccgggagctgcatgtgtcagaggttttcaccgtcatcaccgaaacgcgcgaggcagctgcggtaaagctcatcagcgtggtcgtgaagcgattcacagatgtctgcctgttcatccgcgtccagctcgttgagtttctccagaagcgttaatgtctggcttctgataaagcgggccatgttaagggcggttttttcctgtttggtcactgatgcctccgtgtaagggggatttctgttcatgggggtaatgataccgatgaaacgagagaggatgctcacgatacgggttactgatgatgaacatgcccggttactggaacgttgtgagggtaaacaactggcggtatggatgcggcgggaccagagaaaaatcactcagggtcaatgccagcgcttcgttaatacagatgtaggtgttccacagggtagccagcagcatcctgcgatgcagatccggaacataatggtgcagggcgctgacttccgcgtttccagactttacgaaacacggaaaccgaagaccattcatgttgttgctcaggtcgcagacgttttgcagcagcagtcgcttcacgttcgctcgcgtatcggtgattcattctgctaaccagtaaggcaaccccgccagcctagccgggtcctcaacgacaggagcacgatcatgcgcacccgtggccaggacccaacgctgcccgagatgcgccgcgtgcggctgctggagatggcggacgcgatggatatgttctgccaagggttggtttgcgcattcacagttctccgcaagaattgattggctccaattcttggagtggtgaatccgttagcgaggtgccgccggcttccattcaggtcgaggtggcccggctccatgcaccgcgacgcaacgcggggaggcagacaaggtatagggcggcgcctacaatccatgccaacccgttccatgtgctcgccgaggcggcataaatcgccgtgacgatcagcggtccagtgatcgaagttaggctggtaagagccgcgagcgatccttgaagctgtccctgatggtcgtcatctacctgcctggacagcatggcctgcaacgcgggcatcccgatgccgccggaagcgagaagaatcataatggggaaggccatccagcctcgcgtcgcgaacgccagcaagacgtagcccagcgcgtcggccgccatgccggcgataatggcctgcttctcgccgaaacgtttggtggcgggaccagtgacgaaggcttgagcgagggcgtgcaagattccgaataccgcaagcgacaggccgatcatcgtcgcgctccagcgaaagcggtcctcgccgaaaatgacccagagcgctgccggcacctgtcctacgagttgcatgataaagaagacagtcataagtgcggcgacgatagtcatgccccgcgcccaccggaaggagctgactgggttgaaggctctcaagggcatcggtcgagatcccggtgcctaatgagtgagctaacttacattaattgcgttgcgctcactgcccgctttccagtcgggaaacctgtcgtgccagctgcattaatgaatcggccaacgcgcggggagaggcggtttgcgtattgggcgccagggtggtttttcttttcaccagtgagacgggcaacagctgattgcccttcaccgcctggccctgagagagttgcagcaagcggtccacgctggtttgccccagcaggcgaaaatcctgtttgatggtggttaacggcgggatataacatgagctgtcttcggtatcgtcgtatcccactaccgagatatccgcaccaacgcgcagcccggactcggtaatggcgcgcattgcgcccagcgccatctgatcgttggcaaccagcatcgcagtgggaacgatgccctcattcagcatttgcatggtttgttgaaaaccggacatggcactccagtcgccttcccgttccgctatcggctgaatttgattgcgagtgagatatttatgccagccagccagacgcagacgcgccgagacagaacttaatgggcccgctaacagcgcgatttgctggtgacccaatgcgaccagatgctccacgcccagtcgcgtaccgtcttcatgggagaaaataatactgttgatgggtgtc

SEQ ID NO: 154 - protein, 171 aa, Serratia entomophila; identical to SEQ ID NO: 147

SEQ ID NO: 155 - protein, 687 aa, Serratia entomophila
MHIQSLGATASSLNQEPVETPSQAAHKSASLRQEPSGQGLGVALKSTPGILSGKLPESVSDVRFSSPQGQGESRTLTDSAGPRQITLRQFENGVTELQLSRPPLTSLVLSGGGAKGAAYPGAMLALEEKGMLDGIRSMSGSSAGGITAALLASGMSPAAFKTLSDKMDLISLLDSSNKKLKLFQHISSEIGASLKKGLGNKIGGFSELLLNVLPRIDSRAEPLERLLRDETRKAVLGQIATHPEVARQPTVAAIASRLQSGSGVTFGDLDRLSAYIPQIKTLNITGTAMFEGRPQLVVFNASHTPDLEVAQAAHISGSFPGVFQKVSLSDQPYQAGVEWTEFQDGGVMINVPVPEMIDKNFDSGPLRRNDNLILEFEGEAGEVAPDRGTRGGALKGWVVGVPALQAREMLQLEGLEELREQTVVVPLKSERGDFSGMLGGTLNFTMPDEIKAHLQERLQERVGEHLEKRLQASERHTFASLDEALLALDDSMLTSVAQQNPEITDGAVAFRQKARDAFTELTVAIVSANGLAGRLKLDEAMRSALQRLDALADTPERLAWLAAELNHADNVDHQQLLDAMRGQTVQSPVLAAALAEAQRRKVAVIAENIRKEVIFPSLYRPGQPDSNVALLRRAEEQLRHATSPAEINQALNDIVDNYSARGFLRFGKPLSSTTVEMAKAWRNKEFT

SEQ ID NO: 156 - DNA, 6754 bp, Serratia entomophila
  source 1..6754: mol_type = other DNA
  CDS 933..1445: note = SEAfp18-C8 C-terminal truncation T171
  CDS 1446..1910: note = Pseudomonas aeruginosa Type VI Secretion System Effector Tse1
tggtcagagacatcaagaaataacgccggaacattagtgcaggcagcttccacagcaatggcatcctggtcatccagcggatagttaatgatcagcccactgacgcgttgcgcgagaagattgtgcaccgccgctttacaggcttcgacgccgcttcgttctaccatcgacaccaccacgctggcacccagttgatcggcgcgagatttaatcgccgcgacaatttgcgacggcgcgtgcagggccagactggaggtggcaacgccaatcagcaacgactgtttgcccgccagttgttgtgccacgcggttgggaatgtaattcagctccgccatcgccgcttccactttttcccgcgttttcgcagaaacgtggctggcctggttcaccacgcgggaaacggtctgataagagacaccggcatactctgcgacatcgtataacgttactggtttcacattcaccaccctgaattgactctcttccgggcgctatcatgccataccgcgaaaggttttgcgccattcgatggtgtccgggatctcgacgctctcccttatgcgactcctgcattaggaagcagcccagtagtaggttgaggccgttgagcaccgccgccgcaaggaatggtgcatgcaaggagatggcgcccaacagtcccccggccacggggcctgccaccatacccacgccgaaacaagcgctcatgagcccgaagtggcgagcccgatcttccccatcggtgatgtcggcgatataggcgccagcaaccgcacctgtggcgccggtgatgccggccacgatgcgtccggcgtagaggatcgagatctcgatcccgcgaaattaatacgactcactataggggaattgtgagcggataacaattcccctctagaaataattttgtttaactttaagaaggagatatacatatgccttactccagtgagtcgaaggaaaaagaaacacactcaaaagaaaccgaaagagataatgctgacccagtatttcaacgggtcagccagggcggcgtgggtgtttcaccgcctgatgaggggggagacttgtcggccggaagtaacaatgaccatttattcgcttttattcgtgaaacacacttggaagaagcccaggaattcaggctaaaagggtataacagccaggtgcccgaggttgacgagggattactgacgcagctgcgtgacgacctggcggcggccaaatcccgccagtacgttcaggcaagcgttggggggccgctgggttctcggtggctgctggaacagataggcaaaatagagcggctgacggacaagttttctgacgaagtaataaaacgctgggttaagcatgagctgccacgaaaaaacgtaggggaagccgcggggaccgagttggggagccggcgtagggctcagtcgctggccagacggttggagtcaaccatggacagtctcgatcaatgcatcgtcaacgcctgcaagaacagctgggacaagagctacctggccggcaccccgaacaaggacaactgttccggcttcgtccagtcggtggccgccgagctgggcgtaccgatgccccgcggcaacgccaacgccatggtcgacggcctggagcagagctggaccaagctcgcctccggcgccgaggccgcgcagaaggcggcccagggcttcctggtgatcgccggcctgaagggccgcacctacgggcacgtcgcggtggtcatcagcggtccgctgtatcggcagaagtacccgatgtgctggtgcggcagcatcgccggcgcggtcggccagagccagggcctgaagtcggtcggccaggtgtggaatcgcaccgaccgcgaccgcctcaactactacgtctactccctggccagttgcagcctgcccagggccagttaaggtacccttgaggtgctgtttcagggaccaggaggtagtggatctgcttggagccatccacagttcgaaaaaggtggaggttctggcggtggatcaggtggaagtgcatggtctcaccctcagtttgagaaataaggatccggctgctaacaaagcccgaaaggaagctgagttggctgctgccaccgctgagcaataactagcataaccccttggggcctctaaacgggtcttgaggggttttttgctgaaaggaggaactatatccggatatcccgcaagaggcccggcagtaccggcataaccaagcctatgcctacagcatccagggtgacggtgccgaggatgacgatgagcgcattgttagatttcatacacggtgcctgactgcgttagcaatttaactgtgataaactaccgcattaaagcttatcgatgataagctgtcaaacatgagaattcttgaagacgaaagggcctcgtgatacgcctatttttataggttaatgtcatgataataatggtttcttagacgtcaggtggcacttttcggggaaatgtgcgcggaacccctatttgtttatttttctaaatacattcaaatatgtatccgctcatgagacaataaccctgataaatgcttcaataatattgaaaaaggaagagtatgagtattcaacatttccgtgtcgcccttattcccttttttgcggcattttgccttcctgtttttgctcacccagaaacgctggtgaaagtaaaagatgctgaagatcagttgggtgcacgagtgggttacatcgaactggatctcaacagcggtaagatccttgagagttttcgccccgaagaacgttttccaatgatgagcacttttaaagttctgctatgtggcgcggtattatcccgtgttgacgccgggcaagagcaactcggtcgccgcatacactattctcagaatgacttggttgagtactcaccagtcacagaaaagcatcttacggatggcatgacagtaagagaattatgcagtgctgccataaccatgagtgataacactgcggccaacttacttctgacaacgatcggaggaccgaaggagctaaccgcttttttgcacaacatgggggatcatgtaactcgccttgatcgttgggaaccggagctgaatgaagccataccaaacgacgagcgtgacaccacgatgcctgcagcaatggcaacaacgttgcgcaaactattaactggcgaactacttactctagcttcccggcaacaattaatagactggatggaggcggataaagttgcaggaccacttctgcgctcggcccttccggctggctggtttattgctgataaatctggagccggtgagcgtgggtctcgcggtatcattgcagcactggggccagatggtaagccctcccgtatcgtagttatctacacgacggggagtcaggcaactatggatgaacgaaatagacagatcgctgagataggtgcctcactgattaagcattggtaactgtcagaccaagtttactcatatatactttagattgatttaaaacttcatttttaatttaaaaggatctaggtgaagatcctttttgataatctcatgaccaaaatcccttaacgtgagttttcgttccactgagcgtcagaccccgtagaaaagatcaaaggatcttcttgagatcctttttttctgcgcgtaatctgctgcttgcaaacaaaaaaaccaccgctaccagcggtggtttgtttgccggatcaagagctaccaactctttttccgaaggtaactggcttcagcagagcgcagataccaaatactgtccttctagtgtagccgtagttaggccaccacttcaagaactctgtagcaccgcctacatacctcgctctgctaatcctgttaccagtggctgctgccagtggcgataagtcgtgtcttaccgggttggactcaagacgatagttaccggataaggcgcagcggtcgggctgaacggggggttcgtgcacacagcccagcttggagcgaacgacctacaccgaactgagatacctacagcgtgagctatgagaaagcgccacgcttcccgaagggagaaaggcggacaggtatccggtaagcggcagggtcggaacaggagagcgcacgagggagcttccagggggaaacgcctggtatctttatagtcctgtcgggtttcgccacctctgacttgagcgtcgatttttgtgatgctcgtcaggggggcggagcctatggaaaaacgccagcaacgcggcctttttacggttcctggccttttgctggccttttgctcacatgttctttcctgcgttatcccctgattctgtggataaccgtattaccgcctttgagtgagctgataccgctcgccgcagccgaacgaccgagcgcagcgagtcagtgagcgaggaagcggaagagcgcctgatgcggtattttctccttacgcatctgtgcggtatttcacaccgcatatatggtgcactctcagtacaatctgctctgatgccgcatagttaagccagtatacactccgctatcgctacgtgactgggtcatggctgcgccccgacacccgccaacacccgctgacgcgccctgacgggcttgtctgctcccggcatccgcttacagacaagctgtgaccgtctccgggagctgcatgtgtcagaggttttcaccgtcatcaccgaaacgcgcgaggcagctgcggtaaagctcatcagcgtggtcgtgaagcgattcacagatgtctgcctgttcatccgcgtccagctcgttgagtttctccagaagcgttaatgtctggcttctgataaagcgggccatgttaagggcggttttttcctgtttggtcactgatgcctccgtgtaagggggatttctgttcatgggggtaatgataccgatgaaacgagagaggatgctcacgatacgggttactgatgatgaacatgcccggttactggaacgttgtgagggtaaacaactggcggtatggatgcggcgggaccagagaaaaatcactcagggtcaatgccagcgcttcgttaatacagatgtaggtgttccacagggtagccagcagcatcctgcgatgcagatccggaacataatggtgcagggcgctgacttccgcgtttccagactttacgaaacacggaaaccgaagaccattcatgttgttgctcaggtcgcagacgttttgcagcagcagtcgcttcacgttcgctcgcgtatcggtgattcattctgctaaccagtaaggcaaccccgccagcctagccgggtcctcaacgacaggagcacgatcatgcgcacccgtggccaggacccaacgctgcccgagatgcgccgcgtgcggctgctggagatggcggacgcgatggatatgttctgccaagggttggtttgcgcattcacagttctccgcaagaattgattggctccaattcttggagtggtgaatccgttagcgaggtgccgccggcttccattcaggtcgaggtggcccggctccatgcaccgcgacgcaacgcggggaggcagacaaggtatagggcggcgcctacaatccatgccaacccgttccatgtgctcgccgaggcggcataaatcgccgtgacgatcagcggtccagtgatcgaagttaggctggtaagagccgcgagcgatccttgaagctgtccctgatggtcgtcatctacctgcctggacagcatggcctgcaacgcgggcatcccgatgccgccggaagcgagaagaatcataatggggaaggccatccagcctcgcgtcgcgaacgccagcaagacgtagcccagcgcgtcggccgccatgccggcgataatggcctgcttctcgccgaaacgtttggtggcgggaccagtgacgaaggcttgagcgagggcgtgcaagattccgaataccgcaagcgacaggccgatcatcgtcgcgctccagcgaaagcggtcctcgccgaaaatgacccagagcgctgccggcacctgtcctacgagttgcatgataaagaagacagtcataagtgcggcgacgatagtcatgccccgcgcccaccggaaggagctgactgggttgaaggctctcaagggcatcggtcgagatcccggtgcctaatgagtgagctaacttacattaattgcgttgcgctcactgcccgctttccagtcgggaaacctgtcgtgccagctgcattaatgaatcggccaacgcgcggggagaggcggtttgcgtattgggcgccagggtggtttttcttttcaccagtgagacgggcaacagctgattgcccttcaccgcctggccctgagagagttgcagcaagcggtccacgctggtttgccccagcaggcgaaaatcctgtttgatggtggttaacggcgggatataacatgagctgtcttcggtatcgtcgtatcccactaccgagatatccgcaccaacgcgcagcccggactcggtaatggcgcgcattgcgcccagcgccatctgatcgttggcaaccagcatcgcagtgggaacgatgccctcattcagcatttgcatggtttgttgaaaaccggacatggcactccagtcgccttcccgttccgctatcggctgaatttgattgcgagtgagatatttatgccagccagccagacgcagacgcgccgagacagaacttaatgggcccgctaacagcgcgatttgctggtgacccaatgcgaccagatgctccacgcccagtcgcgtaccgtcttcatgggagaaaataatactgttgatgggtgtc

SEQ ID NO: 157 - protein, 171 aa, Serratia entomophila; identical to SEQ ID NO: 147

SEQ ID NO: 158 - protein, 154 aa, Serratia entomophila
MDSLDQCIVNACKNSWDKSYLAGTPNKDNCSGFVQSVAAELGVPMPRGNANAMVDGLEQSWTKLASGAEAAQKAAQGFLVIAGLKGRTYGHVAVVISGPLYRQKYPMCWCGSIAGAVGQSQGLKSVGQVWNRTDRDRLNYYVYSLASCSLPRAS

SEQ ID NO: 159 - DNA, 6403 bp, Serratia entomophila
  source 1..6403: mol_type = other DNA
  CDS 933..1445: note = SEAfp18-C8 C-terminal truncation T171
  CDS 1446..1559: note = LL37 human antimicrobial peptide, codon optimized for bacterial expression
tggtcagagacatcaagaaataacgccggaacattagtgcaggcagcttccacagcaatggcatcctggtcatccagcggatagttaatgatcagcccactgacgcgttgcgcgagaagattgtgcaccgccgctttacaggcttcgacgccgcttcgttctaccatcgacaccaccacgctggcacccagttgatcggcgcgagatttaatcgccgcgacaatttgcgacggcgcgtgcagggccagactggaggtggcaacgccaatcagcaacgactgtttgcccgccagttgttgtgccacgcggttgggaatgtaattcagctccgccatcgccgcttccactttttcccgcgttttcgcagaaacgtggctggcctggttcaccacgcgggaaacggtctgataagagacaccggcatactctgcgacatcgtataacgttactggtttcacattcaccaccctgaattgactctcttccgggcgctatcatgccataccgcgaaaggttttgcgccattcgatggtgtccgggatctcgacgctctcccttatgcgactcctgcattaggaagcagcccagtagtaggttgaggccgttgagcaccgccgccgcaaggaatggtgcatgcaaggagatggcgcccaacagtcccccggccacggggcctgccaccatacccacgccgaaacaagcgctcatgagcccgaagtggcgagcccgatcttccccatcggtgatgtcggcgatataggcgccagcaaccgcacctgtggcgccggtgatgccggccacgatgcgtccggcgtagaggatcgagatctcgatcccgcgaaattaatacgactcactataggggaattgtgagcggataacaattcccctctagaaataattttgtttaactttaagaaggagatatacatatgccttactccagtgagtcgaaggaaaaagaaacacactcaaaagaaaccgaaagagataatgctgacccagtatttcaacgggtcagccagggcggcgtgggtgtttcaccgcctgatgaggggggagacttgtcggccggaagtaacaatgaccatttattcgcttttattcgtgaaacacacttggaagaagcccaggaattcaggctaaaagggtataacagccaggtgcccgaggttgacgagggattactgacgcagctgcgtgacgacctggcggcggccaaatcccgccagtacgttcaggcaagcgttggggggccgctgggttctcggtggctgctggaacagataggcaaaatagagcggctgacggacaagttttctgacgaagtaataaaacgctgggttaagcatgagctgccacgaaaaaacgtaggggaagccgcggggaccgagttggggagccggcgtagggctcagtcgctggccagacggttggagtcaaccctgctgggtgatttcttccggaaatctaaagagaagattggcaaagagtttaaaagaattgtccagagaatcaaggattttttgcggaatcttgtacccaggacagagtcctaaggtacccttgaggtgctgtttcagggaccaggaggtagtggatctgcttggagccatccacagttcgaaaaaggtggaggttctggcggtggatcaggtggaagtgcatggtctcaccctcagtttgagaaataaggatccggctgctaacaaagcccgaaaggaagctgagttggctgctgccaccgctgagcaataactagcataaccccttggggcctctaaacgggtcttgaggggttttttgctgaaaggaggaactatatccggatatcccgcaagaggcccggcagtaccggcataaccaagcctatgcctacagcatccagggtgacggtgccgaggatgacgatgagcgcattgttagatttcatacacggtgcctgactgcgttagcaatttaactgtgataaactaccgcattaaagcttatcgatgataagctgtcaaacatgagaattcttgaagacgaaagggcctcgtgatacgcctatttttataggttaatgtcatgataataatggtttcttagacgtcaggtggcacttttcggggaaatgtgcgcggaacccctatttgtttatttttctaaatacattcaaatatgtatccgctcatgagacaataaccctgataaatgcttcaataatattgaaaaaggaagagtatgagtattcaacatttccgtgtcgcccttattcccttttttgcggcattttgccttcctgtttttgctcacccagaaacgctggtgaaagtaaaagatgctgaagatcagttgggtgcacgagtgggttacatcgaactggatctcaacagcggtaagatccttgagagttttcgccccgaagaacgttttccaatgatgagcacttttaaagttctgctatgtggcgcggtattatcccgtgttgacgccgggcaagagcaactcggtcgccgcatacactattctcagaatgacttggttgagtactcaccagtcacagaaaagcatcttacggatggcatgacagtaagagaattatgcagtgctgccataaccatgagtgataacactgcggccaacttacttctgacaacgatcggaggaccgaaggagctaaccgcttttttgcacaacatgggggatcatgtaactcgccttgatcgttgggaaccggagctgaatgaagccataccaaacgacgagcgtgacaccacgatgcctgcagcaatggcaacaacgttgcgcaaactattaactggcgaactacttactctagcttcccggcaacaattaatagactggatggaggcggataaagttgcaggaccacttctgcgctcggcccttccggctggctggtttattgctgataaatctggagccggtgagcgtgggtctcgcggtatcattgcagcactggggccagatggtaagccctcccgtatcgtagttatctacacgacggggagtcaggcaactatggatgaacgaaatagacagatcgctgagataggtgcctcactgattaagcattggtaactgtcagaccaagtttactcatatatactttagattgatttaaaacttcatttttaatttaaaaggatctaggtgaagatcctttttgataatctcatgaccaaaatcccttaacgtgagttttcgttccactgagcgtcagaccccgtagaaaagatcaaaggatcttcttgagatcctttttttctgcgcgtaatctgctgcttgcaaacaaaaaaaccaccgctaccagcggtggtttgtttgccggatcaagagctaccaactctttttccgaaggtaactggcttcagcagagcgcagataccaaatactgtccttctagtgtagccgtagttaggccaccacttcaagaactctgtagcaccgcctacatacctcgctctgctaatcctgttaccagtggctgctgccagtggcgataagtcgtgtcttaccgggttggactcaagacgatagttaccggataaggcgcagcggtcgggctgaacggggggttcgtgcacacagcccagcttggagcgaacgacctacaccgaactgagatacctacagcgtgagctatgagaaagcgccacgcttcccgaagggagaaaggcggacaggtatccggtaagcggcagggtcggaacaggagagcgcacgagggagcttccagggggaaacgcctggtatctttatagtcctgtcgggtttcgccacctctgacttgagcgtcgatttttgtgatgctcgtcaggggggcggagcctatggaaaaacgccagcaacgcggcctttttacggttcctggccttttgctggccttttgctcacatgttctttcctgcgttatcccctgattctgtggataaccgtattaccgcctttgagtgagctgataccgctcgccgcagccgaacgaccgagcgcagcgagtcagtgagcgaggaagcggaagagcgcctgatgcggtattttctccttacgcatctgtgcggtatttcacaccgcatatatggtgcactctcagtacaatctgctctgatgccgcatagttaagccagtatacactccgctatcgctacgtgactgggtcatggctgcgccccgacacccgccaacacccgctgacgcgccctgacgggcttgtctgctcccggcatccgcttacagacaagctgtgaccgtctccgggagctgcatgtgtcagaggttttcaccgtcatcaccgaaacgcgcgaggcagctgcggtaaagctcatcagcgtggtcgtgaagcgattcacagatgtctgcctgttcatccgcgtccagctcgttgagtttctccagaagcgttaatgtctggcttctgataaagcgggccatgttaagggcggttttttcctgtttggtcactgatgcctccgtgtaagggggatttctgttcatgggggtaatgataccgatgaaacgagagaggatgctcacgatacgggttactgatgatgaacatgcccggttactggaacgttgtgagggtaaacaactggcggtatggatgcggcgggaccagagaaaaatcactcagggtcaatgccagcgcttcgttaatacagatgtaggtgttccacagggtagccagcagcatcctgcgatgcagatccggaacataatggtgcagggcgctgacttccgcgtttccagactttacgaaacacggaaaccgaagaccattcatgttgttgctcaggtcgcagacgttttgcagcagcagtcgcttcacgttcgctcgcgtatcggtgattcattctgctaaccagtaaggcaaccccgccagcctagccgggtcctcaacgacaggagcacgatcatgcgcacccgtggccaggacccaacgctgcccgagatgcgccgcgtgcggctgctggagatggcggacgcgatggatatgttctgccaagggttggtttgcgcattcacagttctccgcaagaattgattggctccaattcttggagtggtgaatccgttagcgaggtgccgccggcttccattcaggtcgaggtggcccggctccatgcaccgcgacgcaacgcggggaggcagacaaggtatagggcggcgcctacaatccatgccaacccgttccatgtgctcgccgaggcggcataaatcgccgtgacgatcagcggtccagtgatcgaagttaggctggtaagagccgcgagcgatccttgaagctgtccctgatggtcgtcatctacctgcctggacagcatggcctgcaacgcgggcatcccgatgccgccggaagcgagaagaatcataatggggaaggccatccagcctcgcgtcgcgaacgccagcaagacgtagcccagcgcgtcggccgccatgccggcgataatggcctgcttctcgccgaaacgtttggtggcgggaccagtgacgaaggcttgagcgagggcgtgcaagattccgaataccgcaagcgacaggccgatcatcgtcgcgctccagcgaaagcggtcctcgccgaaaatgacccagagcgctgccggcacctgtcctacgagttgcatgataaagaagacagtcataagtgcggcgacgatagtcatgccccgcgcccaccggaaggagctgactgggttgaaggctctcaagggcatcggtcgagatcccggtgcctaatgagtgagctaacttacattaattgcgttgcgctcactgcccgctttccagtcgggaaacctgtcgtgccagctgcattaatgaatcggccaacgcgcggggagaggcggtttgcgtattgggcgccagggtggtttttcttttcaccagtgagacgggcaacagctgattgcccttcaccgcctggccctgagagagttgcagcaagcggtccacgctggtttgccccagcaggcgaaaatcctgtttgatggtggttaacggcgggatataacatgagctgtcttcggtatcgtcgtatcccactaccgagatatccgcaccaacgcgcagcccggactcggtaatggcgcgcattgcgcccagcgccatctgatcgttggcaaccagcatcgcagtgggaacgatgccctcattcagcatttgcatggtttgttgaaaaccggacatggcactccagtcgccttcccgttccgctatcggctgaatttgattgcgagtgagatatttatgccagccagccagacgcagacgcgccgagacagaacttaatgggcccgctaacagcgcgatttgctggtgacccaatgcgaccagatgctccacgcccagtcgcgtaccgtcttcatgggagaaaataatactgttgatgggtgtc

SEQ ID NO: 160 - protein, 171 aa, Serratia entomophila; identical to SEQ ID NO: 147

SEQ ID NO: 161 - protein, 37 aa, Serratia entomophila; identical to SEQ ID NO: 82

SEQ ID NO: 162 - DNA, 11464 bp, Serratia entomophila
  primer_bind 2489..2510: note = primer SEAfp18C6_RV
  primer_bind 2492..2546: note = primer Cas9_SE18C6OH_FW
  primer_bind 6591..6637: note = primer Cas9_pET11aOH_RV
  primer_bind 6618..6645: note = primer pET11a_C3CTS-Stop_lin_FW
  source 1..11464: mol_type = other DNA
  CDS 933..2510: note = SEAfp18-C6 C-terminal truncation K526
  CDS 2511..6620: note = Cas9 from Francisella novicida
tggtcagagacatcaagaaataacgccggaacattagtgcaggcagcttccacagcaatggcatcctggtcatccagcggatagttaatgatcagcccactgacgcgttgcgcgagaagattgtgcaccgccgctttacaggcttcgacgccgcttcgttctaccatcgacaccaccacgctggcacccagttgatcggcgcgagatttaatcgccgcgacaatttgcgacggcgcgtgcagggccagactggaggtggcaacgccaatcagcaacgactgtttgcccgccagttgttgtgccacgcggttgggaatgtaattcagctccgccatcgccgcttccactttttcccgcgttttcgcagaaacgtggctggcctggttcaccacgcgggaaacggtctgataagagacaccggcatactctgcgacatcgtataacgttactggtttcacattcaccaccctgaattgactctcttccgggcgctatcatgccataccgcgaaaggttttgcgccattcgatggtgtccgggatctcgacgctctcccttatgcgactcctgcattaggaagcagcccagtagtaggttgaggccgttgagcaccgccgccgcaaggaatggtgcatgcaaggagatggcgcccaacagtcccccggccacggggcctgccaccatacccacgccgaaacaagcgctcatgagcccgaagtggcgagcccgatcttccccatcggtgatgtcggcgatataggcgccagcaaccgcacctgtggcgccggtgatgccggccacgatgcgtccggcgtagaggatcgagatctcgatcccgcgaaattaatacgactcactataggggaattgtgagcggataacaattcccctctagaaataattttgtttaactttaagaaggagatatacatatgccttactccagtgagtcgaaggaaaaagaaacacactcaaaagaaaccgaaagagataatgctgacccagtatttcaacgggtcagccagggcggcgtgggtgtttcaccgcctgatgaggggggagacttgtcggccggaagtaacaatgaccatttattcgcttttattcgtgaaacacacttggaagaagcccaggaattcaggctaaaagggtataacagccaggtgcccgaggttgacgagggattactgacgcagctgcgtgacgacctggcggcggccaaatcccgccagtacgttcaggcaagcgttggggggccgctgggttctcggtggctgctggaacagataggcaaaatagagcggctgacggacaagttttctgacgaagtaataaaacgctgggttaagcatgagctgccacgaaaaaacgtaggggaagccgcggggaccgagttggggagccggcgtagggctcagtcgctggccagacggttggagtcaaccatgcagacactgatccgcgttgtccataccctgcatgctatggatgactacagtaccccggaaaaacggcacgacatgctggtcgctgagcttaccggcgcgttctcctccagtgataaaaatacggtgatacaggcgctggggagaatgacggcagagacgtcaggtcatgccgcctgggcttcccttatgcaggcccggacagcggcgtgggaggccggtaagtcagccaccgtcgatgcgatgattgcgacttcacagcacgaagcagaaaaagccaataaaaaagcccgtgagcttcagggcgattcacaggctttctttagtcatgtcgccgcctatcttcagagcctctccagcgatttggcaaaagtgtcgattaacatggggcagagcacctcttcctcgactatacggaacgaagcagaaaaagccagtgagcttcagggcgattcacagactttcgttagtcatgtcgccgcctatcttcagagcctccctagcgatttggcaaaagtgccgattaacatgtggcagaatatggattttgttaagacaaaattacaagcgcaaactgcagttgcgggaatgaaagtgcatgcgcaccggcttgtccggatcgcacagcatggtcactccaccaaaacccctgcgaaggatcccgaacaggtcgttaccgattccatcatcagaagcattttatggctgtggcagcagccggccatcaaaatccagtgcgccagcactgcgttgttgtcaaaagtgggtgagctgaaaaaaattgaggggatactggcttcttacgccgtgacggatgagctgggaaacgaacaagaacgccgcaaccctccgggtgaggaggacctggatgcacagctcagggaatgggtgagcgccagccttaagcaggaaaaccccgaaaaccagcgggcggtaaaagtggtgacgctggagcggctgctgggcggtgatatcgccagtgcccgcaacctggtggaacgtctgggaaaagcggaagagggtattcagaatctgctcaggcggcagcaggttgctgtcctgaaaatggataagaaatactcaataggcttagatatcggcacaaatagcgtcggatgggcggtgatcactgatgaatataaggttccgtctaaaaagttcaaggttctgggaaatacagaccgccacagtatcaaaaaaaatcttataggggctcttttatttgacagtggagagacagcggaagcgactcgtctcaaacggacagctcgtagaaggtatacacgtcggaagaatcgtatttgttatctacaggagattttttcaaatgagatggcgaaagtagatgatagtttctttcatcgacttgaagagtcttttttggtggaagaagacaagaagcatgaacgtcatcctatttttggaaatatagtagatgaagttgcttatcatgagaaatatccaactatctatcatctgcgaaaaaaattggtagattctactgataaagcggatttgcgcttaatctatttggccttagcgcatatgattaagtttcgtggtcattttttgattgagggagatttaaatcctgataatagtgatgtggacaaactatttatccagttggtacaaacctacaatcaattatttgaagaaaaccctattaacgcaagtggagtagatgctaaagcgattctttctgcacgattgagtaaatcaagacgattagaaaatctcattgctcagctccccggtgagaagaaaaatggcttatttgggaatctcattgctttgtcattgggtttgacccctaattttaaatcaaattttgatttggcagaagatgctaaattacagctttcaaaagatacttacgatgatgatttagataatttattggcgcaaattggagatcaatatgctgatttgtttttggcagctaagaatttatcagatgctattttactttcagatatcctaagagtaaatactgaaataactaaggctcccctatcagcttcaatgattaaacgctacgatgaacatcatcaagacttgactcttttaaaagctttagttcgacaacaacttccagaaaagtataaagaaatcttttttgatcaatcaaaaaacggatatgcaggttatattgatgggggagctagccaagaagaattttataaatttatcaaaccaattttagaaaaaatggatggtactgaggaattattggtgaaactaaatcgtgaagatttgctgcgcaagcaacggacctttgacaacggctctattccccatcaaattcacttgggtgagctgcatgctattttgagaagacaagaagacttttatccatttttaaaagacaatcgtgagaagattgaaaaaatcttgacttttcgaattccttattatgttggtccattggcgcgtggcaatagtcgttttgcatggatgactcggaagtctgaagaaacaattaccccatggaattttgaagaagttgtcgataaaggtgcttcagctcaatcatttattgaacgcatgacaaactttgataaaaatcttccaaatgaaaaagtactaccaaaacatagtttgctttatgagtattttacggtttataacgaattgacaaaggtcaaatatgttactgaaggaatgcgaaaaccagcatttctttcaggtgaacagaagaaagccattgttgatttactcttcaaaacaaatcgaaaagtaaccgttaagcaattaaaagaagattatttcaaaaaaatagaatgttttgatagtgttgaaatttcaggagttgaagatagatttaatgcttcattaggtacctaccatgatttgctaaaaattattaaagataaagattttttggataatgaagaaaatgaagatatcttagaggatattgttttaacattgaccttatttgaagatagggagatgattgaggaaagacttaaaacatatgctcacctctttgatgataaggtgatgaaacagcttaaacgtcgccgttatactggttggggacgtttgtctcgaaaattgattaatggtattagggataagcaatctggcaaaacaatattagattttttgaaatcagatggttttgccaatcgcaattttatgcagctgatccatgatgatagtttgacatttaaagaagacattcaaaaagcacaagtgtctggacaaggcgatagtttacatgaacatattgcaaatttagctggtagccctgctattaaaaaaggtattttacagactgtaaaagttgttgatgaattggtcaaagtaatggggcggcataagccagaaaatatcgttattgaaatggcacgtgaaaatcagacaactcaaaagggccagaaaaattcgcgagagcgtatgaaacgaatcgaagaaggtatcaaagaattaggaagtcagattcttaaagagcatcctgttgaaaatactcaattgcaaaatgaaaagctctatctctattatctccaaaatggaagagacatgtatgtggaccaagaattagatattaatcgtttaagtgattatgatgtcgatcacattgttccacaaagtttccttaaagacgattcaatagacaataaggtcttaacgcgttctgataaaaatcgtggtaaatcggataacgttccaagtgaagaagtagtcaaaaagatgaaaaactattggagacaacttctaaacgccaagttaatcactcaacgtaagtttgataatttaacgaaagctgaacgtggaggtttgagtgaacttgataaagctggttttatcaaacgccaattggttgaaactcgccaaatcactaagcatgtggcacaaattttggatagtcgcatgaatactaaatacgatgaaaatgataaacttattcgagaggttaaagtgattaccttaaaatctaaattagtttctgacttccgaaaagatttccaattctataaagtacgtgagattaacaattaccatcatgcccatgatgcgtatctaaatgccgtcgttggaactgctttgattaagaaatatccaaaacttgaatcggagtttgtctatggtgattataaagtttatgatgttcgtaaaatgattgctaagtctgagcaagaaataggcaaagcaaccgcaaaatatttcttttactctaatatcatgaacttcttcaaaacagaaattacacttgcaaatggagagattcgcaaacgccctctaatcgaaactaatggggaaactggagaaattgtctgggataaagggcgagattttgccacagtgcgcaaagtattgtccatgccccaagtcaatattgtcaagaaaacagaagtacagacaggcggattctccaaggagtcaattttaccaaaaagaaattcggacaagcttattgctcgtaaaaaagactgggatccaaaaaaatatggtggttttgatagtccaacggtagcttattcagtcctagtggttgctaaggtggaaaaagggaaatcgaagaagttaaaatccgttaaagagttactagggatcacaattatggaaagaagttcctttgaaaaaaatccgattgactttttagaagctaaaggatataaggaagttaaaaaagacttaatcattaaactacctaaatatagtctttttgagttagaaaacggtcgtaaacggatgctggctagtgccggagaattacaaaaaggaaatgagctggctctgccaagcaaatatgtgaattttttatatttagctagtcattatgaaaagttgaagggtagtccagaagataacgaacaaaaacaattgtttgtggagcagcataagcattatttagatgagattattgagcaaatcagtgaattttctaagcgtgttattttagcagatgccaatttagataaagttcttagtgcatataacaaacatagagacaaaccaatacgtgaacaagcagaaaatattattcatttatttacgttgacgaatcttggagctcccgctgcttttaaatattttgatacaacaattgatcgtaaacgatatacgtctacaaaagaagttttagatgccactcttatccatcaatccatcactggtctttatgaaacacgcattgatttgagtcagctaggaggtgactgataaggtacccttgaggtgctgtttcagggaccaggaggtagtggatctgcttggagccatccacagttcgaaaaaggtggaggttctggcggtggatcaggtggaagtgcatggtctcaccctcagtttgagaaataaggatccggctgctaacaaagcccgaaaggaagctgagttggctgctgccaccgctgagcaataactagcataaccccttggggcctctaaacgggtcttgaggggttttttgctgaaaggaggaactatatccggatatcccgcaagaggcccggcagtaccggcataaccaagcctatgcctacagcatccagggtgacggtgccgaggatgacgatgagcgcattgttagatttcatacacggtgcctgactgcgttagcaatttaactgtgataaactaccgcattaaagcttatcgatgataagctgtcaaacatgagaattcttgaagacgaaagggcctcgtgatacgcctatttttataggttaatgtcatgataataatggtttcttagacgtcaggtggcacttttcggggaaatgtgcgcggaacccctatttgtttatttttctaaatacattcaaatatgtatccgctcatgagacaataaccctgataaatgcttcaataatattgaaaaaggaagagtatgagtattcaacatttccgtgtcgcccttattcccttttttgcggcattttgccttcctgtttttgctcacccagaaacgctggtgaaagtaaaagatgctgaagatcagttgggtgcacgagtgggttacatcgaactggatctcaacagcggtaagatccttgagagttttcgccccgaagaacgttttccaatgatgagcacttttaaagttctgctatgtggcgcggtattatcccgtgttgacgccgggcaagagcaactcggtcgccgcatacactattctcagaatgacttggttgagtactcaccagtcacagaaaagcatcttacggatggcatgacagtaagagaattatgcagtgctgccataaccatgagtgataacactgcggccaacttacttctgacaacgatcggaggaccgaaggagctaaccgcttttttgcacaacatgggggatcatgtaactcgccttgatcgttgggaaccggagctgaatgaagccataccaaacgacgagcgtgacaccacgatgcctgcagcaatggcaacaacgttgcgcaaactattaactggcgaactacttactctagcttcccggcaacaattaatagactggatggaggcggataaagttgcaggaccacttctgcgctcggcccttccggctggctggtttattgctgataaatctggagccggtgagcgtgggtctcgcggtatcattgcagcactggggccagatggtaagccctcccgtatcgtagttatctacacgacggggagtcaggcaactatggatgaacgaaatagacagatcgctgagataggtgcctcactgattaagcattggtaactgtcagaccaagtttactcatatatactttagattgatttaaaacttcatttttaatttaaaaggatctaggtgaagatcctttttgataatctcatgaccaaaatcccttaacgtgagttttcgttccactgagcgtcagaccccgtagaaaagatcaaaggatcttcttgagatcctttttttctgcgcgtaatctgctgcttgcaaacaaaaaaaccaccgctaccagcggtggtttgtttgccggatcaagagctaccaactctttttccgaaggtaactggcttcagcagagcgcagataccaaatactgtccttctagtgtagccgtagttaggccaccacttcaagaactctgtagcaccgcctacatacctcgctctgctaatcctgttaccagtggctgctgccagtggcgataagtcgtgtcttaccgggttggactcaagacgatagttaccggataaggcgcagcggtcgggctgaacggggggttcgtgcacacagcccagcttggagcgaacgacctacaccgaactgagatacctacagcgtgagctatgagaaagcgccacgcttcccgaagggagaaaggcggacaggtatccggtaagcggcagggtcggaacaggagagcgcacgagggagcttccagggggaaacgcctggtatctttatagtcctgtcgggtttcgccacctctgacttgagcgtcgatttttgtgatgctcgtcaggggggcggagcctatggaaaaacgccagcaacgcggcctttttacggttcctggccttttgctggccttttgctcacatgttctttcctgcgttatcccctgattctgtggataaccgtattaccgcctttgagtgagctgataccgctcgccgcagccgaacgaccgagcgcagcgagtcagtgagcgaggaagcggaagagcgcctgatgcggtattttctccttacgcatctgtgcggtatttcacaccgcatatatggtgcactctcagtacaatctgctctgatgccgcatagttaagccagtatacactccgctatcgctacgtgactgggtcatggctgcgccccgacacccgccaacacccgctgacgcgccctgacgggcttgtctgctcccggcatccgcttacagacaagctgtgaccgtctccgggagctgcatgtgtcagaggttttcaccgtcatcaccgaaacgcgcgaggcagctgcggtaaagctcatcagcgtggtcgtgaagcgattcacagatgtctgcctgttcatccgcgtccagctcgttgagtttctccagaagcgttaatgtctggcttctgataaagcgggccatgttaagggcggttttttcctgtttggtcactgatgcctccgtgtaagggggatttctgttcatgggggtaatgataccgatgaaacgagagaggatgctcacgatacgggttactgatgatgaacatgcccggttactggaacgttgtgagggtaaacaactggcggtatggatgcggcgggaccagagaaaaatcactcagggtcaatgccagcgcttcgttaatacagatgtaggtgttccacagggtagccagcagcatcctgcgatgcagatccggaacataatggtgcagggcgctgacttccgcgtttccagactttacgaaacacggaaaccgaagaccattcatgttgttgctcaggtcgcagacgttttgcagcagcagtcgcttcacgttcgctcgcgtatcggtgattcattctgctaaccagtaaggcaaccccgccagcctagccgggtcctcaacgacaggagcacgatcatgcgcacccgtggccaggacccaacgctgcccgagatgcgccgcgtgcggctgctggagatggcggacgcgatggatatgttctgccaagggttggtttgcgcattcacagttctccgcaagaattgattggctccaattcttggagtggtgaatccgttagcgaggtgccgccggcttccattcaggtcgaggtggcccggctccatgcaccgcgacgcaacgcggggaggcagacaaggtatagggcggcgcctacaatccatgccaacccgttccatgtgctcgccgaggcggcataaatcgccgtgacgatcagcggtccagtgatcgaagttaggctggtaagagccgcgagcgatccttgaagctgtccctgatggtcgtcatctacctgcctggacagcatggcctgcaacgcgggcatcccgatgccgccggaagcgagaagaatcataatggggaaggccatccagcctcgcgtcgcgaacgccagcaagacgtagcccagcgcgtcggccgccatgccggcgataatggcctgcttctcgccgaaacgtttggtggcgggaccagtgacgaaggcttgagcgagggcgtgcaagattccgaataccgcaagcgacaggccgatcatcgtcgcgctccagcgaaagcggtcctcgccgaaaatgacccagagcgctgccggcacctgtcctacgagttgcatgataaagaagacagtcataagtgcggcgacgatagtcatgccccgcgcccaccggaaggagctgactgggttgaaggctctcaagggcatcggtcgagatcccggtgcctaatgagtgagctaacttacattaattgcgttgcgctcactgcccgctttccagtcgggaaacctgtcgtgccagctgcattaatgaatcggccaacgcgcggggagaggcggtttgcgtattgggcgccagggtggtttttcttttcaccagtgagacgggcaacagctgattgcccttcaccgcctggccctgagagagttgcagcaagcggtccacgctggtttgccccagcaggcgaaaatcctgtttgatggtggttaacggcgggatataacatgagctgtcttcggtatcgtcgtatcccactaccgagatatccgcaccaacgcgcagcccggactcggtaatggcgcgcattgcgcccagcgccatctgatcgttggcaaccagcatcgcagtgggaacgatgccctcattcagcatttgcatggtttgttgaaaaccggacatggcactccagtcgccttcccgttccgctatcggctgaatttgattgcgagtgagatatttatgccagccagccagacgcagacgcgccgagacagaacttaatgggcccgctaacagcgcgatttgctggtgacccaatgcgaccagatgctccacgcccagtcgcgtaccgtcttcatgggagaaaataatactgttgatgggtgtc

SEQ ID NO: 163 - protein, 526 aa, Serratia entomophila; identical to SEQ ID NO: 123

SEQ ID NO: 164 - protein, 1368 aa, Serratia entomophila [sequence omitted]

SEQ ID NO: 165 - DNA, 9721 bp, Serratia entomophila
  primer_bind 999..1022: note = primer SEAfp18C10_RV
  primer_bind 1003..1063: note = primer PAlopT_Yoptox_SE18C10OH_FW
  primer_bind 4856..4894: note = primer PAlopT-RHStox_OHpET11a_RV
  primer_bind 4875..4902: note = primer pET11a_C3CTS-Stop_lin_FW
  source 1..9721: mol_type = other DNA
  CDS 933..1022: note = SEAfp18-C10 C-terminal truncation S30
  CDS 1023..1997: note = Photorhabdus asymbiotica YopT (PAU_RS10125)
  CDS 2097..4877: note = Photorhabdus asymbiotica RHS repeat containing protein (PAU_RS10120)
tggtcagagacatcaagaaataacgccggaacattagtgcaggcagcttccacagcaatggcatcctggtcatccagcggatagttaatgatcagcccactgacgcgttgcgcgagaagattgtgcaccgccgctttacaggcttcgacgccgcttcgttctaccatcgacaccaccacgctggcacccagttgatcggcgcgagatttaatcgccgcgacaatttgcgacggcgcgtgcagggccagactggaggtggcaacgccaatcagcaacgactgtttgcccgccagttgttgtgccacgcggttgggaatgtaattcagctccgccatcgccgcttccactttttcccgcgttttcgcagaaacgtggctggcctggttcaccacgcgggaaacggtctgataagagacaccggcatactctgcgacatcgtataacgttactggtttcacattcaccaccctgaattgactctcttccgggcgctatcatgccataccgcgaaaggttttgcgccattcgatggtgtccgggatctcgacgctctcccttatgcgactcctgcattaggaagcagcccagtagtaggttgaggccgttgagcaccgccgccgcaaggaatggtgcatgcaaggagatggcgcccaacagtcccccggccacggggcctgccaccatacccacgccgaaacaagcgctcatgagcccgaagtggcgagcccgatcttccccatcggtgatgtcggcgatataggcgccagcaaccgcacctgtggcgccggtgatgccggccacgatgcgtccggcgtagaggatcgagatctcgatcccgcgaaattaatacgactcactataggggaattgtgagcggataacaattcccctctagaaataattttgtttaactttaagaaggagatatacatatgccttactccagtgagtcgaaggaaaaagaaacacactcaaaagaaaccgaaagagataatgctgacccagtatttcaacgggtcagcatggaacgtgaatataataagaaagaaaaacagaaaaagtcagcaattaagttggatgatgctgttggaaataatgaggaaaacatggatatgactagcccattggaacttaattctcaatacactaatagaaaaaggccggggttacgcgagcgtttttcggccactctgcaacgtaacctaccaggccattctatgctcgatcgggagctaaccaccgatggtcaaaaaaaccaagagagtcgattctcccctggcatgataatggataggatcatgcatctcggggtcaggacccgattagggaaagttcgaaattcggcaagtaaatacgggggtcaagtcaccttcaaatttgcccaaaccaaaggtaccttcctggaccaaatcatgaaacacaaagacacctcaggcggtgtctgtgagtctatatctgctcactggataagcgcccatgccaaaggtgaaagcatcttcgatcaactctatgtcgggggccaaaaaggaaaatttcatatcgacacgttgttttccattaagcagttacagatggacggctatctggatgatgaacaaagtacaatgacagagtactggcttggtacacaaggcattcaaccaaacaggcaaaaaaatgacaacatgaacgaacactcatccaagatagtgggtgaaaccggtaccagaggtacaaaagacctattacgcgctattctggatacgggtgataaaggatcaggctacaagaagatcagttttctcggaaaaatggctggacatactgtcgctgcctatgtagatgaccagaaaggtgtcactttttttgatcccaacttcggtgaattcaactttccggataaagtctcattttctcactggtttactgacgatttttggccaaaatcttggtacagcctggaaatcggtctggggcaagaatttgaagtcttcaactatgagcctaaagaaccctaattcacaactatccctaacaacttcatcgatagaaattcggtcctgcaaattcaacatttccacttcttttaggacaatcatcaaattaaggagaataaaatgatatccactttcgacccggccatatgtgctggcactcccaccgtcacggtattggataaccggaacctgactgtgcgggagatagtcttccaccgagccaaagcaggtggcgataccgacacacttattacccgtcatcagtatgatttacgcggaaatctaacccaaagccttgatccgcgcctctatgacctgatgcagaaagataatactgtgcaacctaatttctactggcagcacgatctgttaggcagagtgttgcatacggtaagtatcgatgctggcggtacggtgacactcagcgatattgaagatcgtcccgctttgaacgtaaacgccatgggcgtagtgaaaacctggcaatatgaagccaactcattgcctggccgcttgctatcagtcagtgagcaatctgctaatgaagcagtaccacgagttatcgagcatttcatctgggccggtaattctcaagcggagaaagaccttaacctggctggtcagtatatgcgtcactacgatacagctgggctggatcagctcaacagtttgtctctgaccggtgcacacttatctcagtcattgcaattgctaaaggatgatcaaatgccagattgggccggtgataacgagtcagtctggcaaaataaactaaaaaacgaggttcacactacacaaagtacaacagatgccaccggtgcacctctgacccaaaccgacgctaaagaaaatatgcagcgtctggcatacaacgtaaccgggcaactgaaaagcagttggttgacactgaatgggcaattggaacagatcatcgtcaaatccctagcctattcggaatcaggtcaaaagatacgcgaagagcatggtaacggcgtcgtcacaaaatactcttatgagcctgatacccagcgattaatcaatatcactacccaacgttccaaaggacacgtttttagtgagaaattactccaagatttactctatgaatatgatccggtaggtaacatagtcagtattctcaatcgtgcagaagcaacccatttctggcgcaatcagaaagtgtctcccaggaacacttacacctatgactctctatatcaacttattcagtctaccggtcgcgaaatggctgatattggtcaacaaaacaacaaaatgcctacaccacttgttcctctttcctctgatgacaaggtatataccacatacacccgtacttacagttatgaccggggcaataatctgacgaaaattcagcatcgtgcaccagcaagccacaatatttacacgacagaaataacagtatccaaccgcagtaatcgggcggtactgagccataacggactgacgccaagagaagtggatgctcagtttgatgcaagtgggcatcagatatcgttgccgacaggacaaaatctaagctggaatcagagaggcgagctacagcaagcaacgacaatcaatcgtgataatagcgcaacagaccgggaatggtaccgctacaatgcgggttcagcgcgcatcctgaaagtcagtgaacagcagacgggtaacagtacgcagcagcagcaagtcacttatctacctgggttggaactgcggacaacgaaatcaggcaccaacacaactgaagatctgcaagttatcaccatggtggaaaccgagcgaacacaagtgcgaatattgcattggtcggcaggaaaacccaatgacatagctaataatcaagtacgttacagttacgacaatctgattgagagtaacgttatggagctagacaccaaaggtaaaatcatcagtcaggaagaatattatccatacggaggtaccgcaatatggaccgcaagaaaccaaattgaagccagttacaaaaccgtcagatattcaggtaaagaacgagataaaacggggttgtattactaccgacaccgttactatcagccttggttaggtagatggctaagcgccgatccagcgggaaccgtggacggattgaacttgtaccgaatggtcaagaataacccaattcgttatcaggatgagtcgggaaccaatgcaaacgataaagctcaagcaatctttaaggaaggtaaaaaaatagcgattaatcaactcaaaatagccagtaactttttaaaagatagcaaaaatagtgaaaacgcccttgaaatctacagaatattttttgggggccaccaagatattgaacaactgccacaatggaaaaaacgtatcgacagcgttatttatgggctagacaagttgaaaaccaccaaacatgttcattatcaacaggataaatcaggttcatccagcaccgttgccgatttaaatgttgatgagtataaaaaatggtcagaaggaaataaaagtatctacgtgaatgtgtatgctgatgcgctgaaaagagtgtatgaagatcccctattaggtcgcgagcatgtcgcccatattgccattcacgaattatctcatggcgtattgcgtactcaagatcataaatatattggtgttttatccagcccaggctcacacgacttaaccgacttgctgagtatacttatgccaccggccaatgagcaggatagaacagaaaaacagcgccgtgccactggcgccagaaaagcgctggaaaatgcagattcatttaccctatcagcacgatatttgtactacactgcacaagatccaaatttcttatcatcccttcgcaaagcacacagagacttcaataacaaaaaaactgatcggttgattatcaggccccctgaaagacggtaaggtacccttgaggtgctgtttcagggaccaggaggtagtggatctgcttggagccatccacagttcgaaaaaggtggaggttctggcggtggatcaggtggaagtgcatggtctcaccctcagtttgagaaataaggatccggctgctaacaaagcccgaaaggaagctgagttggctgctgccaccgctgagcaataactagcataaccccttggggcctctaaacgggtcttgaggggttttttgctgaaaggaggaactatatccggatatcccgcaagaggcccggcagtaccggcataaccaagcctatgcctacagcatccagggtgacggtgccgaggatgacgatgagcgcattgttagatttcatacacggtgcctgactgcgttagcaatttaactgtgataaactaccgcattaaagcttatcgatgataagctgtcaaacatgagaattcttgaagacgaaagggcctcgtgatacgcctatttttataggttaatgtcatgataataatggtttcttagacgtcaggtggcacttttcggggaaatgtgcgcggaacccctatttgtttatttttctaaatacattcaaatatgtatccgctcatgagacaataaccctgataaatgcttcaataatattgaaaaaggaagagtatgagtattcaacatttccgtgtcgcccttattcccttttttgcggcattttgccttcctgtttttgctcacccagaaacgctggtgaaagtaaaagatgctgaagatcagttgggtgcacgagtgggttacatcgaactggatctcaacagcggtaagatccttgagagttttcgccccgaagaacgttttccaatgatgagcacttttaaagttctgctatgtggcgcggtattatcccgtgttgacgccgggcaagagcaactcggtcgccgcatacactattctcagaatgacttggttgagtactcaccagtcacagaaaagcatcttacggatggcatgacagtaagagaattatgcagtgctgccataaccatgagtgataacactgcggccaacttacttctgacaacgatcggaggaccgaaggagctaaccgcttttttgcacaacatgggggatcatgtaactcgccttgatcgttgggaaccggagctgaatgaagccataccaaacgacgagcgtgacaccacgatgcctgcagcaatggcaacaacgttgcgcaaactattaactggcgaactacttactctagcttcccggcaacaattaatagactggatggaggcggataaagttgcaggaccacttctgcgctcggcccttccggctggctggtttattgctgataaatctggagccggtgagcgtgggtctcgcggtatcattgcagcactggggccagatggtaagccctcccgtatcgtagttatctacacgacggggagtcaggcaactatggatgaacgaaatagacagatcgctgagataggtgcctcactgattaagcattggtaactgtcagaccaagtttactcatatatactttagattgatttaaaacttcatttttaatttaaaaggatctaggtgaagatcctttttgataatctcatgaccaaaatcccttaacgtgagttttcgttccactgagcgtcagaccccgtagaaaagatcaaaggatcttcttgagatcctttttttctgcgcgtaatctgctgcttgcaaacaaaaaaaccaccgctaccagcggtggtttgtttgccggatcaagagctaccaactctttttccgaaggtaactggcttcagcagagcgcagataccaaatactgtccttctagtgtagccgtagttaggccaccacttcaagaactctgtagcaccgcctacatacctcgctctgctaatcctgttaccagtggctgctgccagtggcgataagtcgtgtcttaccgggttggactcaagacgatagttaccggataaggcgcagcggtcgggctgaacggggggttcgtgcacacagcccagcttggagcgaacgacctacaccgaactgagatacctacagcgtgagctatgagaaagcgccacgcttcccgaagggagaaaggcggacaggtatccggtaagcggcagggtcggaacaggagagcgcacgagggagcttccagggggaaacgcctggtatctttatagtcctgtcgggtttcgccacctctgacttgagcgtcgatttttgtgatgctcgtcaggggggcggagcctatggaaaaacgccagcaacgcggcctttttacggttcctggccttttgctggccttttgctcacatgttctttcctgcgttatcccctgattctgtggataaccgtattaccgcctttgagtgagctgataccgctcgccgcagccgaacgaccgagcgcagcgagtcagtgagcgaggaagcggaagagcgcctgatgcggtattttctccttacgcatctgtgcggtatttcacaccgcatatatggtgcactctcagtacaatctgctctgatgccgcatagttaagccagtatacactccgctatcgctacgtgactgggtcatggctgcgccccgacacccgccaacacccgctgacgcgccctgacgggcttgtctgctcccggcatccgcttacagacaagctgtgaccgtctccgggagctgcatgtgtcagaggttttcaccgtcatcaccgaaacgcgcgaggcagctgcggtaaagctcatcagcgtggtcgtgaagcgattcacagatgtctgcctgttcatccgcgtccagctcgttgagtttctccagaagcgttaatgtctggcttctgataaagcgggccatgttaagggcggttttttcctgtttggtcactgatgcctccgtgtaagggggatttctgttcatgggggtaatgataccgatgaaacgagagaggatgctcacgatacgggttactgatgatgaacatgcccggttactggaacgttgtgagggtaaacaactggcggtatggatgcggcgggaccagagaaaaatcactcagggtcaatgccagcgcttcgttaatacagatgtaggtgttccacagggtagccagcagcatcctgcgatgcagatccggaacataatggtgcagggcgctgacttccgcgtttccagactttacgaaacacggaaaccgaagaccattcatgttgttgctcaggtcgcagacgttttgcagcagcagtcgcttcacgttcgctcgcgtatcggtgattcattctgctaaccagtaaggcaaccccgccagcctagccgggtcctcaacgacaggagcacgatcatgcgcacccgtggccaggacccaacgctgcccgagatgcgccgcgtgcggctgctggagatggcggacgcgatggatatgttctgccaagggttggtttgcgcattcacagttctccgcaagaattgattggctccaattcttggagtggtgaatccgttagcgaggtgccgccggcttccattcaggtcgaggtggcccggctccatgcaccgcgacgcaacgcggggaggcagacaaggtatagggcggcgcctacaatccatgccaacccgttccatgtgctcgccgaggcggcataaatcgccgtgacgatcagcggtccagtgatcgaagttaggctggtaagagccgcgagcgatccttgaagctgtccctgatggtcgtcatctacctgcctggacagcatggcctgcaacgcgggcatcccgatgccgccggaagcgagaagaatcataatggggaaggccatccagcctcgcgtcgcgaacgccagcaagacgtagcccagcgcgtcggccgccatgccggcgataatggcctgcttctcgccgaaacgtttggtggcgggaccagtgacgaaggcttgagcgagggcgtgcaagattccgaataccgcaagcgacaggccgatcatcgtcgcgctccagcgaaagcggtcctcgccgaaaatgacccagagcgctgccggcacctgtcctacgagttgcatgataaagaagacagtcataagtgcggcgacgatagtcatgccccgcgcccaccggaaggagctgactgggttgaaggctctcaagggcatcggtcgagatcccggtgcctaatgagtgagctaacttacattaattgcgttgcgctcactgcccgctttccagtcgggaaacctgtcgtgccagctgcattaatgaatcggccaacgcgcggggagaggcggtttgcgtattgggcgccagggtggtttttcttttcaccagtgagacgggcaacagctgattgcccttcaccgcctggccctgagagagttgcagcaagcggtccacgctggtttgccccagcaggcgaaaatcctgtttgatggtggttaacggcgggatataacatgagctgtcttcggtatcgtcgtatcccactaccgagatatccgcaccaacgcgcagcccggactcggtaatggcgcgcattgcgcccagcgccatctgatcgttggcaaccagcatcgcagtgggaacgatgccctcattcagcatttgcatggtttgttgaaaaccggacatggcactccagtcgccttcccgttccgctatcggctgaatttgattgcgagtgagatatttatgccagccagccagacgcagacgcgccgagacagaacttaatgggcccgctaacagcgcgatttgctggtgacccaatgcgaccagatgctccacgcccagtcgcgtaccgtcttcatgggagaaaataatactgttgatgggtgtc

SEQ ID NO: 166 - protein, 30 aa, Serratia entomophila; identical to SEQ ID NO: 84

SEQ ID NO: 167 - protein, 324 aa, Serratia entomophila
MEREYNKKEKQKKSAIKLDDAVGNNEENMDMTSPLELNSQYTNRKRPGLRERFSATLQRNLPGHSMLDRELTTDGQKNQESRFSPGMIMDRIMHLGVRTRLGKVRNSASKYGGQVTFKFAQTKGTFLDQIMKHKDTSGGVCESISAHWISAHAKGESIFDQLYVGGQKGKFHIDTLFSIKQLQMDGYLDDEQSTMTEYWLGTQGIQPNRQKNDNMNEHSSKIVGETGTRGTKDLLRAILDTGDKGSGYKKISFLGKMAGHTVAAYVDDQKGVTFFDPNFGEFNFPDKVSFSHWFTDDFWPKSWYSLEIGLGQEFEVFNYEPKEP

SEQ ID NO: 168 - protein, 926 aa, Serratia entomophila
MISTFDPAICAGTPTVTVLDNRNLTVREIVFHRAKAGGDTDTLITRHQYDLRGNLTQSLDPRLYDLMQKDNTVQPNFYWQHDLLGRVLHTVSIDAGGTVTLSDIEDRPALNVNAMGVVKTWQYEANSLPGRLLSVSEQSANEAVPRVIEHFIWAGNSQAEKDLNLAGQYMRHYDTAGLDQLNSLSLTGAHLSQSLQLLKDDQMPDWAGDNESVWQNKLKNEVHTTQSTTDATGAPLTQTDAKENMQRLAYNVTGQLKSSWLTLNGQLEQIIVKSLAYSESGQKIREEHGNGVVTKYSYEPDTQRLINITTQRSKGHVFSEKLLQDLLYEYDPVGNIVSILNRAEATHFWRNQKVSPRNTYTYDSLYQLIQSTGREMADIGQQNNKMPTPLVPLSSDDKVYTTYTRTYSYDRGNNLTKIQHRAPASHNIYTTEITVSNRSNRAVLSHNGLTPREVDAQFDASGHQISLPTGQNLSWNQRGELQQATTINRDNSATDREWYRYNAGSARILKVSEQQTGNSTQQQQVTYLPGLELRTTKSGTNTTEDLQVITMVETERTQVRILHWSAGKPNDIANNQVRYSYDNLIESNVMELDTKGKIISQEEYYPYGGTAIWTARNQIEASYKTVRYSGKERDKTGLYYYRHRYYQPWLGRWLSADPAGTVDGLNLYRMVKNNPIRYQDESGTNANDKAQAIFKEGKKIAINQLKIASNFLKDSKNSENALEIYRIFFGGHQDIEQLPQWKKRIDSVIYGLDKLKTTKHVHYQQDKSGSSSTVADLNVDEYKKWSEGNKSIYVNVYADALKRVYEDPLLGREHVAHIAIHELSHGVLRTQDHKYIGVLSSPGSHDLTDLLSILMPPANEQDRTEKQRRATGARKALENADSFTLSARYLYYTAQDPNFLSSLRKAHRDFNNKKTDRLIIRPPERR

SEQ ID NO: 169 - DNA, 7909 bp, Serratia entomophila
  primer_bind 1425..1445: note = primer SEAfp18C8_RV
  primer_bind 1426..1477: note = primer PLDJCVC5_RtxA_OHSE18C8_FW
  primer_bind 3033..3082: note = primer PLDJCVC5_RtxA_pET11aOH_RV
  primer_bind 3063..3090: note = primer pET11a_C3CTS-Stop_lin_FW
  source 1..7909: mol_type = other DNA
  CDS 933..1445: note = SEAfp18-C8 C-terminal truncation T171
  CDS 1446..3065: note = Photorhabdus luminescens RtxA toxin (PluDJC_12685)
tggtcagagacatcaagaaataacgccggaacattagtgcaggcagcttccacagcaatggcatcctggtcatccagcggatagttaatgatcagcccactgacgcgttgcgcgagaagattgtgcaccgccgctttacaggcttcgacgccgcttcgttctaccatcgacaccaccacgctggcacccagttgatcggcgcgagatttaatcgccgcgacaatttgcgacggcgcgtgcagggccagactggaggtggcaacgccaatcagcaacgactgtttgcccgccagttgttgtgccacgcggttgggaatgtaattcagctccgccatcgccgcttccactttttcccgcgttttcgcagaaacgtggctggcctggttcaccacgcgggaaacggtctgataagagacaccggcatactctgcgacatcgtataacgttactggtttcacattcaccaccctgaattgactctcttccgggcgctatcatgccataccgcgaaaggttttgcgccattcgatggtgtccgggatctcgacgctctcccttatgcgactcctgcattaggaagcagcccagtagtaggttgaggccgttgagcaccgccgccgcaaggaatggtgcatgcaaggagatggcgcccaacagtcccccggccacggggcctgccaccatacccacgccgaaacaagcgctcatgagcccgaagtggcgagcccgatcttccccatcggtgatgtcggcgatataggcgccagcaaccgcacctgtggcgccggtgatgccggccacgatgcgtccggcgtagaggatcgagatctcgatcccgcgaaattaatacgactcactataggggaattgtgagcggataacaattcccctctagaaataattttgtttaactttaagaaggagatatacatatgccttactccagtgagtcgaaggaaaaagaaacacactcaaaagaaaccgaaagagataatgctgacccagtatttcaacgggtcagccagggcggcgtgggtgtttcaccgcctgatgaggggggagacttgtcggccggaagtaacaatgaccatttattcgcttttattcgtgaaacacacttggaagaagcccaggaattcaggctaaaagggtataacagccaggtgcccgaggttgacgagggattactgacgcagctgcgtgacgacctggcggcggccaaatcccgccagtacgttcaggcaagcgttggggggccgctgggttctcggtggctgctggaacagataggcaaaatagagcggctgacggacaagttttctgacgaagtaataaaacgctgggttaagcatgagctgccacgaaaaaacgtaggggaagccgcggggaccgagttggggagccggcgtagggctcagtcgctggccagacggttggagtcaaccatggtatatgaatacgataaaaccatcgaaagaagaagaaatccgtcgatacaattgaataataatgaaaaatcatctgaacaggcattagaattgtctcaaaataatccattactccacgatctcatcaccagcaataatttacgtaaagaggctgcggtttttgccaaacggattggtccctcctatcaggaaattctggatgaacttgagcatctccatcacctaagtgggaatgagcaattggcggcaggtttcgaattgcatcgacgcattacccattacctagaggaacatcctgattctaaacgtaatactgccctgagaaggacacaaacgcagtttggggatctgatgtttaccggtactttgcagaaaatacgccactcgttgttggaaatggcggaaactcgccctgaaatggcatcgcatatctaccagattgctcgtgaagaggtcaaaggcaatacccccgggctaaccgatctgatggtacgctgggtaaaagaagatccctatcttgctgctaaaaccggctatcaaggaaaaattcccaacgatctaccttttgaacctaagtttcacgtggagctaggtgctcaatttgatgactttaaaaagtggttggacaccgcccagagtaaggaattgctgactcatacccggcttgatgaacagaataaacaggtccatcttggctacagctataatgagctgttagatatgactggcgttgaaagcgtgcaaatggcggtctatttccttaaagaagctgccaaacaagccgaaccgggttctactaaatcgcaagaggacattttgctccaccggtttgctaatcctacctatctggcccaactggaacacagtagattggcacaaatagaagcaatatatcacagctctcatgacactgatgtgactgcctgggatcagcaatttgcctcagatgcgctgacgcaatttaatcatcaactgaataacaccgtggatctgaacagccagttatctcttttacttaaagatcgtcaagggctactgatcggtgaaagtcatggctcagatctgaacggattgcgttttgtcgaagagcagatggaagtattaaaagcgcatggcgtgacagtcattgggctggaacacttacgctcagatttagctcaaccgttgatagataaattcctggcaagtggaaatgaacccatgcctgctgaactggccgcactgcttaagactaaacatttatctgcgaatttgtttgaacaagccagaagcaagcagatgaaaatcattgcactagataacaacagcacaactcgccctaccgtggaaggaacacaacatggcctgatgtatcgtgcaggggcagctaataacgtggcggttgaacgtttacggcaattgcctgcgggagagaagttcgttgccatttatggtaatgctcatttgcaatcccatgaaggtattgatcactttttacccggcattacccatcgtcttggtttaccggctctcaaggtagatgaaaataatcgttttaccgctcaggtcgataatatcaaccaacgcaaacgttatgatgatgtggttgaattaccccgtattcaattaacatcttaaggtacccttgaggtgctgtttcagggaccaggaggtagtggatctgcttggagccatccacagttcgaaaaaggtggaggttctggcggtggatcaggtggaagtgcatggtctcaccctcagtttgagaaataaggatccggctgctaacaaagcccgaaaggaagctgagttggctgctgccaccgctgagcaataactagcataaccccttggggcctctaaacgggtcttgaggggttttttgctgaaaggaggaactatatccggatatcccgcaagaggcccggcagtaccggcataaccaagcctatgcctacagcatccagggtgacggtgccgaggatgacgatgagcgcattgttagatttcatacacggtgcctgactgcgttagcaatttaactgtgataaactaccgcattaaagcttatcgatgataagctgtcaaacatgagaattcttgaagacgaaagggcctcgtgatacgcctatttttataggttaatgtcatgataataatggtttcttagacgtcaggtggcacttttcggggaaatgtgcgcggaacccctatttgtttatttttctaaatacattcaaatatgtatccgctcatgagacaataaccctgataaatgcttcaataatattgaaaaaggaagagtatgagtattcaacatttccgtgtcgcccttattcccttttttgcggcattttgccttcctgtttttgctcacccagaaacgctggtgaaagtaaaagatgctgaagatcagttgggtgcacgagtgggttacatcgaactggatctcaacagcggtaagatccttgagagttttcgccccgaagaacgttttccaatgatgagcacttttaaagttctgctatgtggcgcggtattatcccgtgttgacgccgggcaagagcaactcggtcgccgcatacactattctcagaatgacttggttgagtactcaccagtcacagaaaagcatcttacggatggcatgacagtaagagaattatgcagtgctgccataaccatgagtgataacactgcggccaacttacttctgacaacgatcggaggaccgaaggagctaaccgcttttttgcacaacatgggggatcatgtaactcgccttgatcgttgggaaccggagctgaatgaagccataccaaacgacgagcgtgacaccacgatgcctgcagcaatggcaacaacgttgcgcaaactattaactggcgaactacttactctagcttcccggcaacaattaatagactggatggaggcggataaagttgcaggaccacttctgcgctcggcccttccggctggctggtttattgctgataaatctggagccggtgagcgtgggtctcgcggtatcattgcagcactggggccagatggtaagccctcccgtatcgtagttatctacacgacggggagtcaggcaactatggatgaacgaaatagacagatcgctgagataggtgcctcactgattaagcattggtaactgtcagaccaagtttactcatatatactttagattgatttaaaacttcatttttaatttaaaaggatctaggtgaagatcctttttgataatctcatgaccaaaatcccttaacgtgagttttcgttccactgagcgtcagaccccgtagaaaagatcaaaggatcttcttgagatcctttttttctgcgcgtaatctgctgcttgcaaacaaaaaaaccaccgctaccagcggtggtttgtttgccggatcaagagctaccaactctttttccgaaggtaactggcttcagcagagcgcagataccaaatactgtccttctagtgtagccgtagttaggccaccacttcaagaactctgtagcaccgcctacatacctcgctctgctaatcctgttaccagtggctgctgccagtggcgataagtcgtgtcttaccgggttggactcaagacgatagttaccggataaggcgcagcggtcgggctgaacggggggttcgtgcacacagcccagcttggagcgaacgacctacaccgaactgagatacctacagcgtgagctatgagaaagcgccacgcttcccgaagggagaaaggcggacaggtatccggtaagcggcagggtcggaacaggagagcgcacgagggagcttccagggggaaacgcctggtatctttatagtcctgtcgggtttcgccacctctgacttgagcgtcgatttttgtgatgctcgtcaggggggcggagcctatggaaaaacgccagcaacgcggcctttttacggttcctggccttttgctggccttttgctcacatgttctttcctgcgttatcccctgattctgtggataaccgtattaccgcctttgagtgagctgataccgctcgccgcagccgaacgaccgagcgcagcgagtcagtgagcgaggaagcggaagagcgcctgatgcggtattttctccttacgcatctgtgcggtatttcacaccgcatatatggtgcactctcagtacaatctgctctgatgccgcatagttaagccagtatacactccgctatcgctacgtgactgggtcatggctgcgccccgacacccgccaacacccgctgacgcgccctgacgggcttgtctgctcccggcatccgcttacagacaagctgtgaccgtctccgggagctgcatgtgtcagaggttttcaccgtcatcaccgaaacgcgcgaggcagctgcggtaaagctcatcagcgtggtcgtgaagcgattcacagatgtctgcctgttcatccgcgtccagctcgttgagtttctccagaagcgttaatgtctggcttctgataaagcgggccatgttaagggcggttttttcctgtttggtcactgatgcctccgtgtaagggggatttctgttcatgggggtaatgataccgatgaaacgagagaggatgctcacgatacgggttactgatgatgaacatgcccggttactggaacgttgtgagggtaaacaactggcggtatggatgcggcgggaccagagaaaaatcactcagggtcaatgccagcgcttcgttaatacagatgtaggtgttccacagggtagccagcagcatcctgcgatgcagatccggaacataatggtgcagggcgctgacttccgcgtttccagactttacgaaacacggaaaccgaagaccattcatgttgttgctcaggtcgcagacgttttgcagcagcagtcgcttcacgttcgctcgcgtatcggtgattcattctgctaaccagtaaggcaaccccgccagcctagccgggtcctcaacgacaggagcacgatcatgcgcacccgtggccaggacccaacgctgcccgagatgcgccgcgtgcggctgctggagatggcggacgcgatggatatgttctgccaagggttggtttgcgcattcacagttctccgcaagaattgattggctccaattcttggagtggtgaatccgttagcgaggtgccgccggcttccattcaggtcgaggtggcccggctccatgcaccgcgacgcaacgcggggaggcagacaaggtatagggcggcgcctacaatccatgccaacccgttccatgtgctcgccgaggcggcataaatcgccgtgacgatcagcggtccagtgatcgaagttaggctggtaagagccgcgagcgatccttgaagctgtccctgatggtcgtcatctacctgcctggacagcatggcctgcaacgcgggcatcccgatgccgccggaagcgagaagaatcataatggggaaggccatccagcctcgcgtcgcgaacgccagcaagacgtagcccagcgcgtcggccgccatgccggcgataatggcctgcttctcgccgaaacgtttggtggcgggaccagtgacgaaggcttgagcgagggcgtgcaagattccgaataccgcaagcgacaggccgatcatcgtcgcgctccagcgaaagcggtcctcgccgaaaatgacccagagcgctgccggcacctgtcctacgagttgcatgataaagaagacagtcataagtgcggcgacgatagtcatgccccgcgcccaccggaaggagctgactgggttgaaggctctcaagggcatcggtcgagatcccggtgcctaatgagtgagctaacttacattaattgcgttgcgctcactgcccgctttccagtcgggaaacctgtcgtgccagctgcattaatgaatcggccaacgcgcggggagaggcggtttgcgtattgggcgccagggtggtttttcttttcaccagtgagacgggcaacagctgattgcccttcaccgcctggccctgagagagttgcagcaagcggtccacgctggtttgccccagcaggcgaaaatcctgtttgatggtggttaacggcgggatataacatgagctgtcttcggtatcgtcgtatcccactaccgagatatccgcaccaacgcgcagcccggactcggtaatggcgcgcattgcgcccagcgccatctgatcgttggcaaccagcatcgcagtgggaacgatgccctcattcagcatttgcatggtttgttgaaaaccggacatggcactccagtcgccttcccgttccgctatcggctgaatttgattgcgagtgagatatttatgccagccagccagacgcagacgcgccgagacagaacttaatgggcccgctaacagcgcgatttgctggtgacccaatgcgaccagatgctccacgcccagtcgcgtaccgtcttcatgggagaaaataatactgttgatgggtgtc

SEQ ID NO: 170 - protein, 171 aa, Serratia entomophila; identical to SEQ ID NO: 147

SEQ ID NO: 171 - protein, 539 aa, Serratia entomophila
MVYEYDKTIERRRNPSIQLNNNEKSSEQALELSQNNPLLHDLITSNNLRKEAAVFAKRIGPSYQEILDELEHLHHLSGNEQLAAGFELHRRITHYLEEHPDSKRNTALRRTQTQFGDLMFTGTLQKIRHSLLEMAETRPEMASHIYQIAREEVKGNTPGLTDLMVRWVKEDPYLAAKTGYQGKIPNDLPFEPKFHVELGAQFDDFKKWLDTAQSKELLTHTRLDEQNKQVHLGYSYNELLDMTGVESVQMAVYFLKEAAKQAEPGSTKSQEDILLHRFANPTYLAQLEHSRLAQIEAIYHSSHDTDVTAWDQQFASDALTQFNHQLNNTVDLNSQLSLLLKDRQGLLIGESHGSDLNGLRFVEEQMEVLKAHGVTVIGLEHLRSDLAQPLIDKFLASGNEPMPAELAALLKTKHLSANLFEQARSKQMKIIALDNNSTTRPTVEGTQHGLMYRAGAANNVAVERLRQLPAGEKFVAIYGNAHLQSHEGIDHFLPGITHRLGLPALKVDENNRFTAQVDNINQRKRYDDVVELPRIQLTS

SEQ ID NO: 172 - DNA, 14155 bp, Serratia entomophila
  primer_bind 876..932: note = primer NEWpET11aLinYRAfp17tox_RV
  primer_bind 912..959: note = primer SEAfp17_OHpET11a_FW
  primer_bind 9271..9328: note = primer SEAfp18_stop_pET11a_RV
  primer_bind 9309..9336: note = primer pET11a_C3CTS-Stop_lin_FW
  source 1..14155: mol_type = other DNA
  CDS 933..2009: note = SEAfp17 remnant toxin
  CDS 2211..9311: note = SEAfp18 toxin
tggtcagagacatcaagaaataacgccggaacattagtgcaggcagcttccacagcaatggcatcctggtcatccagcggatagttaatgatcagcccactgacgcgttgcgcgagaagattgtgcaccgccgctttacaggcttcgacgccgcttcgttctaccatcgacaccaccacgctggcacccagttgatcggcgcgagatttaatcgccgcgacaatttgcgacggcgcgtgcagggccagactggaggtggcaacgccaatcagcaacgactgtttgcccgccagttgttgtgccacgcggttgggaatgtaattcagctccgccatcgccgcttccactttttcccgcgttttcgcagaaacgtggctggcctggttcaccacgcgggaaacggtctgataagagacaccggcatactctgcgacatcgtataacgttactggtttcacattcaccaccctgaattgactctcttccgggcgctatcatgccataccgcgaaaggttttgcgccattcgatggtgtccgggatctcgacgctctcccttatgcgactcctgcattaggaagcagcccagtagtaggttgaggccgttgagcaccgccgccgcaaggaatggtgcatgcaaggagatggcgcccaacagtcccccggccacggggcctgccaccatacccacgccgaaacaagcgctcatgagcccgaagtggcgagcccgatcttccccatcggtgatgtcggcgatataggcgccagcaaccgcacctgtggcgccggtgatgccggccacgatgcgtccggcgtagaggatcgagatctcgatcccgcgaaattaatacgactcactataggggaattgtgagcggataacaattcccctctagaaataattttgtttaactttaagaaggagatatacatatgccgactaaaacaccacagttacagctggcgatcgaagaatttaataaagcaatattacgggctgcagaatatgaatggaatattgaaaataatatttacgataaagttcacacacttttcccagcagcagataaatctctaaaagagagtgtggtcgcgcagagcgttgaaaaaatatctgaggaaaaccaggcgtttgagtttaaccacttgggtaacgatctccttgaatttccggcagtagaatatattgctcgttcttttttacgcagaatactggaaaaactggctatttatcaagctagagatccatcatttactataacgaaaaccaatcaggatgccgggataggtttcttggaagggtgggaaagcgataacgcgaaatgggcaaagcaaatgaacgcgctgctgaatgaaagcaaggttaacgcccgcgttttgaccagcctggcatacagctatatccgcttttttcgcccgctgaagacattgcgcaagctgggaggggaggctaatgagtctttgctgaacagcaaagaagccaacccgcgtctggatatttttgccagctcaacggcgggagcgccgccggtcatgtcgaagccgatcaccactcagcctcacggctgggtgtggctaaaatacgccgactggaacgccgcggaagcgttgggtatcaaaacgtccacggatttaattggcagccggccaagcagcgaccagcataaaggtacaggcttcaagtttaagggcatgctgcaggcgataaagccgccgctgtatcgacgccattcattttcccttagggaacgcgacgaacatgaatcggggtacggcggtttcgttatcaacgataagtcgatgacctcaataggggcagaaaaaccgttggtggtgaattggcgtcagcagaacatggataaaaagctgccgatgttttccggcccgtccagcaccacttcctatatgtatgaaattgcccgtttgctgaatctgcctgctgctgaaacacaggtatctacgttttcgataattcggctctgtcaagtatttaggtcagagtgtaactaatagttttgtcacattagcgtaggtcagataccagcgaatacactgaatatgcagccacaggaagagatgatggcagagtgcgatattgtcgcgtcgtatcgctgcattatccgcatggtaaaaagaagacacttaactttcattcggtcatagcgcttttcagagtccagtcgtcaataatccaatcgtgaggacagttttatgccttactccagtgagtcgaaggaaaaagaaacacactcaaaagaaaccgaaagagataatgctgacccagtatttcaacgggtcagccagggcggcgtgggtgtttcaccgcctgatgaggggggagacttgtcggccggaagtaacaatgaccatttattcgcttttattcgtgaaacacacttggaagaagcccaggaattcaggctaaaagggtataacagccaggtgcccgaggttgacgagggattactgacgcagctgcgtgacgacctggcggcggccaaatcccgccagtacgttcaggcaagcgttggggggccgctgggttctcggtggctgctggaacagataggcaaaatagagcggctgacggacaagttttctgacgaagtaataaaacgctgggttaagcatgagctgccacgaaaaaacgtaggggaagccgcggggaccgagttggggagccggcgtagggctcagtcgctggccagacggttggagtcaaccatgcagacactgatccgcgttgtccataccctgcatgctatggatgactacagtaccccggaaaaacggcacgacatgctggtcgctgagcttaccggcgcgttctcctccagtgataaaaatacggtgatacaggcgctggggagaatgacggcagagacgtcaggtcatgccgcctgggcttcccttatgcaggcccggacagcggcgtgggaggccggtaagtcagccaccgtcgatgcgatgattgcgacttcacagcacgaagcagaaaaagccaataaaaaagcccgtgagcttcagggcgattcacaggctttctttagtcatgtcgccgcctatcttcagagcctctccagcgatttggcaaaagtgtcgattaacatggggcagagcacctcttcctcgactatacggaacgaagcagaaaaagccagtgagcttcagggcgattcacagactttcgttagtcatgtcgccgcctatcttcagagcctccctagcgatttggcaaaagtgccgattaacatgtggcagaatatggattttgttaagacaaaattacaagcgcaaactgcagttgcgggaatgaaagtgcatgcgcaccggcttgtccggatcgcacagcatggtcactccaccaaaacccctgcgaaggatcccgaacaggtcgttaccgattccatcatcagaagcattttatggctgtggcagcagccggccatcaaaatccagtgcgccagcactgcgttgttgtcaaaagtgggtgagctgaaaaaaattgaggggatactggcttcttacgccgtgacggatgagctgggaaacgaacaagaacgccgcaaccctccgggtgaggaggacctggatgcacagctcagggaatgggtgagcgccagccttaagcaggaaaaccccgaaaaccagcgggcggtaaaagtggtgacgctggagcggctgctgggcggtgatatcgccagtgcccgcaacctggtggaacgtctgggaaaagcggaagagggtattcagaatctgctcaggcggcagcaggttgctgtcctgaaaatgtcagttgagcgcttgcctgccgctgtttcctctctgaaggccgtggataaattactgccggatttggcaggtgacctcacggcgagtatcgccgccctgagcaacgcccttcaggcagccgaataccccgcccgcgactttagcgaagcaaaaatacaggccggctatgcacaattgtgggcgacaaaggtgaaggaaagtctgtcggcagcgtctgcacggctgaccgaaagaccgctggatgaacattcacggggcgcacgccttgccaaacattgggcaaacctcgccaaagaacggagcgtgggtaattatccgccgccggatgcacagcaggtacttgcctccctgaaggaacaggggctattagcggggaccctttcaaccggagatccggccgggtatcttttcgccacccggcttgccggtgagcttgaaaatgccggtaatggtgaattgcgattaccgatgagtccggagcaatatgttgctttagagaagggacttgttgagtatattgtaaaatggggacaacggcggatctcacaaggagtcacccgcattgttattgagttgtcctttgagcaggctctggatacggtatcgttcaacgtgtccaagctcttccggttaccttataaggtgctgaaggcctcgataaaaataccgtacaatgtcaataaggttaataattataccatgccgggccatgataagccctataaggcaatttatggcttgctgggaaaaaagcttaagcaacttggctttaatttactgacggcacccgtgcctggcgtgatgaaacttgtggctggcaccgggataaccgcaggtgcaggcgtgcataatttacgtgtcgaaaatagagagaaaacattcagcgcggtttatcaacacgtggtggaaggaaagcaaagtgaaaaaataaaaatggactccgtgaagtcgatgatttttgattcagtgctcgataccgccactacggccgcttttaaagggggacgaagagcctggcaatcaggaagaaataaaaacgacattgaaatcaatgaggtaacactttctcaagcacagcagcgccaagtggcagccaacaatgttgacactgcatgggggaatgctgctgcgaatgagaggaaggttgagccagtgagtcattcatcaccattacagcaacaaaccgatgttaggccgttctctgataagagtgaccaggatgctgctcaacctcgagtacgtaaacgggcagtggcggatatggctccccctccccctcatcaatggcataataacattcctgccaacacgacgctacagtcagaacattttgattttgatcgtgacatacgttatcagggcttctccgatgagaagaaaaaacaaacctatttacatggtattcaacttgtattgcttcagatacaaaatgatggacgctttgcacagaagatcaggaataatgcctaccttgccagtataggcgtttcgaacttagtacctgtcgatatagaaggatataaacttaaaaatacatttcttcttcctgatagcccaagtgctaaatctggagttattgttcgcttagattctgaaaatccttattactatgttggcaaagggagtgatcttttagaagacatcaaatgggccatgcctcatgatgctaatgaacagaagtatgaatatatgcctgattctgatgggaacgctcacttttaccgtctgcgcaacggttttgatatctttaatgatattaggatggggaattcaagtttcgaatatttctttaattataataatccggagccgataagcatcacgagactttcttcatatcttgcaaatactattgagggtgactataaaaacggatcgtcgcccccaaaaaacaaactattaatttccagagcgattactggtgctcatattcctgacccaggggtcactgcaaccgccgctggatatcatatcgaattcacctgggataatttgacttcagcagagtatctgaggtcattttcaaggcccttctctaccctcagtggagaaatgcagttagtgtctagctccattaatggagaaacgatacaggaaacagagctgcatgttcatcaggctgaatatataggaagctgggttgatgctactgtcggggccatcacatctttcacgccggagggatgggttctcaataccacactatcggcagcggacattgctgctgatttgacagaagataaggatcctgacccaatggcggttgctggcctggttgtaggatgcattcctggtggtcggattgcagctaaagtcggaaagttcacccgtattggcggtaaggttgttaaatacgggcttatgcttggcaataaagcggtcgacctggccatcgtagggaagagcgttaagatagctgtagacacgggtgatccactcgcaatttataaggcgcttctgatcagtggcataggtactacgaattcttacgatatggcaaagaatatgtcatcaaagctaaaaatcagcaagaaactggaagacagtgttcaattagataaaccactacaaaatctaaggggaggaagcaagcgtcctgaagagggtgaatcaacctcgcagaagcgttcacagccagatgagagtccagaaaatagtcaggaggctgtatattcaggcccctccggcagagctcgggtgacttttgaccagacgaccgaacatcatataatgcttaatagattttccagacttgtgttagctagaagttttgcagagaaaagaatacagtcttttgaacacagttcttcgaaatttaaaagcagtgacgagtttaaggtagataaaagcatacctttagatgcacaaaatgcttcacttaacgacatggcgagtaagacagataacttaattaatcagctagaacaatttacaggagataagaaagaatccatttccgccaatctgaaaaacatccagttaatgattggtgatataatggaaaatagaaacaataggaatgataatttaaatttccatacttatgtcttggttgggaaaaatacaacatatgacgaaataagtaactattatggttttgctgagtttaaattttcaataaataatggcaatcttactcttaacaaccttataggccacccttatgtcgtcattaataaataccctgaatttagagattatttgataagaaatggagtcatcacccaacccgagcttgaaccatataacataaagaatgtggctcggtatcttggctctaaagcggtgagcagtgagattggttattatgaatccattccagctactaaagtgaagattctctcgtttactggagccaatccgattacgcaaaaattaggtaatacacttcagagtatctctgatcttttttcaaaaaaacgattttcggacgaaccgaatgacgccatcactcaggatgaactatttacccgtcagactgatttatatacttatgatgagatgataaatcatctaaaaactatagtaagaacgacattcacacctgttaaaccgatagaagaaatatccagtgaaaaaactgatgcggccattaaaggaataatgaccaatggggatgcggaaataatttccgaaaacattatcgagagcaaaaatagtttagaccatgatacaagttatttttctcatgaagttatttcagctgttgatcgtgcatatgaaaaagtaaactccgtgaaatctctttttgaacgtgcagaatctcagcctgagattaaatctcaattaaaatcattaattaatgaagccactggattgaatgatgaggttatcattgatattgataaagtagatgtttctagcatatcagacatggcctataacaggtttaaagataatatcaatactctacatgactatctctctaagcaaaaatcagggggttatacatcctttgttttatttaaatatcgccagtttaatccatccaagcctgatgcctttgccatgccctatgacagtaagaaaagaatttttctggctatgttgccagaaaatcagcgccatggtggattagttgatacggtgacccatgaagcttcacataattcttcttacacattagatcatacttatatagggaacgcgcggagtaacaccggttcatttccttcctcatttgaacctccaactcgagattcgaggtatttttatgaaaatgaacgggtaggtaaactgagtgcaaagtatgctttagacttacccgaaaatgctaatatcacccaaaatcaactagcgcaggcagatattctgttaagaaacagcaggttgactaaagcagatacgcttctgaatgctgcagaatataatgcttatatgattgacgttctaagccgggtaaaaataaacggctcacatattgagtttgaagaaaactcatccagaagcaaacgctctgtttccggaggaaatcataaacttgatgatataattatactggcttcgatgaacgctacgcttcctaggagggaggggggggaatttgagtcatctaccttcaagaaaacattaacggaatttataaacaagggtacgaccagcagtcaggttgatcctgtttatgcatcctatctaccagcgtttaataccattgtagatagcgagggtattacattgcaacaggtgaaagacttaaaatcagctctgcccgcaaccggcaacgatctgagggctcaagccagatataactatgcggtgctacaatatttatctgggtcggcaggaattaagctaccaattgatactgatgtaatacgaaatagcattaatgatgatctgaatattgcaagttgcgtagataactgtaaaaaggcagcctcacaaaggcttgagttgttgaaggcggtgccagaatatttatctgggccggaagcaattcacgcacagattgatactaatttaatgataaatagaattaagaacactctgaaacatgaaaattacacatatgatcttaaagtaaatgaaagggattatcttttattacagttggaacaaaaatatatagcttcgagtaaacctcctaaagtcggagctcaaaaatggagtgctgacataaataaagaaattaattatttatgcgatgagatcgaagaaaaaaaacgcgaggtggtttgttgggagaataagaagaatgaatcatcacgaagacttgatttgtggagtacggcgacgaaatatttatctgacccgaaaggaattaaaccaccgattgatactgatgtaatactcaataacattaatgatgttcttaatcatgctggctacgtatataactataaagtgagagaaaaggataatcttgagaaaaagttgagtagaacccccctaacaagtcagatagaagtgaaccgtttacaaaccgagatcgcaaaaagatatagactaatagattattgggggaaaaaagcagatgaaacattactaatgtttatcttgtggaggaatgtgtttggttaaggtacccttgaggtgctgtttcagggaccaggaggtagtggatctgcttggagccatccacagttcgaaaaaggtggaggttctggcggtggatcaggtggaagtgcatggtctcaccctcagtttgagaaataaggatccggctgctaacaaagcccgaaaggaagctgagttggctgctgccaccgctgagcaataactagcataaccccttggggcctctaaacgggtcttgaggggttttttgctgaaaggaggaactatatccggatatcccgcaagaggcccggcagtaccggcataaccaagcctatgcctacagcatccagggtgacggtgccgaggatgacgatgagcgcattgttagatttcatacacggtgcctgactgcgttagcaatttaactgtgataaactaccgcattaaagcttatcgatgataagctgtcaaacatgagaattcttgaagacgaaagggcctcgtgatacgcctatttttataggttaatgtcatgataataatggtttcttagacgtcaggtggcacttttcggggaaatgtgcgcggaacccctatttgtttatttttctaaatacattcaaatatgtatccgctcatgagacaataaccctgataaatgcttcaataatattgaaaaaggaagagtatgagtattcaacatttccgtgtcgcccttattcccttttttgcggcattttgccttcctgtttttgctcacccagaaacgctggtgaaagtaaaagatgctgaagatcagttgggtgcacgagtgggttacatcgaactggatctcaacagcggtaagatccttgagagttttcgccccgaagaacgttttccaatgatgagcacttttaaagttctgctatgtggcgcggtattatcccgtgttgacgccgggcaagagcaactcggtcgccgcatacactattctcagaatgacttggttgagtactcaccagtcacagaaaagcatcttacggatggcatgacagtaagagaattatgcagtgctgccataaccatgagtgataacactgcggccaacttacttctgacaacgatcggaggaccgaaggagctaaccgcttttttgcacaacatgggggatcatgtaactcgccttgatcgttgggaaccggagctgaatgaagccataccaaacgacgagcgtgacaccacgatgcctgcagcaatggcaacaacgttgcgcaaactattaactggcgaactacttactctagcttcccggcaacaattaatagactggatggaggcggataaagttgcaggaccacttctgcgctcggcccttccggctggctggtttattgctgataaatctggagccggtgagcgtgggtctcgcggtatcattgcagcactggggccagatggtaagccctcccgtatcgtagttatctacacgacggggagtcaggcaactatggatgaacgaaatagacagatcgctgagataggtgcctcactgattaagcattggtaactgtcagaccaagtttactcatatatactttagattgatttaaaacttcatttttaatttaaaaggatctaggtgaagatcctttttgataatctcatgaccaaaatcccttaacgtgagttttcgttccactgagcgtcagaccccgtagaaaagatcaaaggatcttcttgagatcctttttttctgcgcgtaatctgctgcttgcaaacaaaaaaaccaccgctaccagcggtggtttgtttgccggatcaagagctaccaactctttttccgaaggtaactggcttcagcagagcgcagataccaaatactgtccttctagtgtagccgtagttaggccaccacttcaagaactctgtagcaccgcctacatacctcgctctgctaatcctgttaccagtggctgctgccagtggcgataagtcgtgtcttaccgggttggactcaagacgatagttaccggataaggcgcagcggtcgggctgaacggggggttcgtgcacacagcccagcttggagcgaacgacctacaccgaactgagatacctacagcgtgagctatgagaaagcgccacgcttcccgaagggagaaaggcggacaggtatccggtaagcggcagggtcggaacaggagagcgcacgagggagcttccagggggaaacgcctggtatctttatagtcctgtcgggtttcgccacctctgacttgagcgtcgatttttgtgatgctcgtcaggggggcggagcctatggaaaaacgccagcaacgcggcctttttacggttcctggccttttgctggccttttgctcacatgttctttcctgcgttatcccctgattctgtggataaccgtattaccgcctttgagtgagctgataccgctcgccgcagccgaacgaccgagcgcagcgagtcagtgagcgaggaagcggaagagcgcctgatgcggtattttctccttacgcatctgtgcggtatttcacaccgcatatatggtgcactctcagtacaatctgctctgatgccgcatagttaagccagtatacactccgctatcgctacgtgactgggtcatggctgcgccccgacacccgccaacacccgctgacgcgccctgacgggcttgtctgctcccggcatccgcttacagacaagctgtgaccgtctccgggagctgcatgtgtcagaggttttcaccgtcatcaccgaaacgcgcgaggcagctgcggtaaagctcatcagcgtggtcgtgaagcgattcacagatgtctgcctgttcatccgcgtccagctcgttgagtttctccagaagcgttaatgtctggcttctgataaagcgggccatgttaagggcggttttttcctgtttggtcactgatgcctccgtgtaagggggatttctgttcatgggggtaatgataccgatgaaacgagagaggatgctcacgatacgggttactgatgatgaacatgcccggttactggaacgttgtgagggtaaacaactggcggtatggatgcggcgggaccagagaaaaatcactcagggtcaatgccagcgcttcgttaatacagatgtaggtgttccacagggtagccagcagcatcctgcgatgcagatccggaacataatggtgcagggcgctgacttccgcgtttccagactttacgaaacacggaaaccgaagaccattcatgttgttgctcaggtcgcagacgttttgcagcagcagtcgcttcacgttcgctcgcgtatcggtgattcattctgctaaccagtaaggcaaccccgccagcctagccgggtcctcaacgacaggagcacgatcatgcgcacccgtggccaggacccaacgctgcccgagatgcgccgcgtgcggctgctggagatggcggacgcgatggatatgttctgccaagggttggtttgcgcattcacagttctccgcaagaattgattggctccaattcttggagtggtgaatccgttagcgaggtgccgccggcttccattcaggtcgaggtggcccggctccatgcaccgcgacgcaacgcggggaggcagacaaggtatagggcggcgcctacaatccatgccaacccgttccatgtgctcgccgaggcggcataaatcgccgtgacgatcagcggtccagtgatcgaagttaggctggtaagagccgcgagcgatccttgaagctgtccctgatggtcgtcatctacctgcctggacagcatggcctgcaacgcgggcatcccgatgccgccggaagcgagaagaatcataatggggaaggccatccagcctcgcgtcgcgaacgccagcaagacgtagcccagcgcgtcggccgccatgccggcgataatggcctgcttctcgccgaaacgtttggtggcgggaccagtgacgaaggcttgagcgagggcgtgcaagattccgaataccgcaagcgacaggccgatcatcgtcgcgctccagcgaaagcggtcctcgccgaaaatgacccagagcgctgccggcacctgtcctacgagttgcatgataaagaagacagtcataagtgcggcgacgatagtcatgccccgcgcccaccggaaggagctgactgggttgaaggctctcaagggcatcggtcgagatcccggtgcctaatgagtgagctaacttacattaattgcgttgcgctcactgcccgctttccagtcgggaaacctgtcgtgccagctgcattaatgaatcggccaacgcgcggggagaggcggtttgcgtattgggcgccagggtggtttttcttttcaccagtgagacgggcaacagctgattgcccttcaccgcctggccctgagagagttgcagcaagcggtccacgctggtttgccccagcaggcgaaaatcctgtttgatggtggttaacggcgggatataacatgagctgtcttcggtatcgtcgtatcccactaccgagatatccgcaccaacgcgcagcccggactcggtaatggcgcgcattgcgcccagcgccatctgatcgttggcaaccagcatcgcagtgggaacgatgccctcattcagcatttgcatggtttgttgaaaaccggacatggcactccagtcgccttcccgttccgctatcggctgaatttgattgcgagtgagatatttatgccagccagccagacgcagacgcgccgagacagaacttaatgggcccgctaacagcgcgatttgctggtgacccaatgcgaccagatgctccacgcccagtcgcgtaccgtcttcatgggagaaaataatactgttgatgggtgtc

SEQ ID NO: 173 - protein, 358 aa, Serratia entomophila; identical to SEQ ID NO: 18

SEQ ID NO: 174 - protein, 2366 aa, Serratia entomophila; identical to SEQ ID NO: 19

SEQ ID NO: 175 - DNA, 13591 bp, Serratia entomophila
  primer_bind 7993..8030: note = primer afp18_nostop_RV
  primer_bind 8011..8054: note = primer sfGFP_SEAfp18OH_FW
  primer_bind 8719..8764: note = primer sfGFP_SEAfp18OH_RV
  primer_bind 8745..8772: note = primer pET11a_C3CTS-Stop_lin_FW
  source 1..13591: mol_type = other DNA
  CDS 933..8030: note = SEAfp18
  CDS 8031..8747: note = superfolder GFP (sfGFP)
tggtcagagacatcaagaaataacgccggaacattagtgcaggcagcttccacagcaatggcatcctggtcatccagcggatagttaatgatcagcccactgacgcgttgcgcgagaagattgtgcaccgccgctttacaggcttcgacgccgcttcgttctaccatcgacaccaccacgctggcacccagttgatcggcgcgagatttaatcgccgcgacaatttgcgacggcgcgtgcagggccagactggaggtggcaacgccaatcagcaacgactgtttgcccgccagttgttgtgccacgcggttgggaatgtaattcagctccgccatcgccgcttccactttttcccgcgttttcgcagaaacgtggctggcctggttcaccacgcgggaaacggtctgataagagacaccggcatactctgcgacatcgtataacgttactggtttcacattcaccaccctgaattgactctcttccgggcgctatcatgccataccgcgaaaggttttgcgccattcgatggtgtccgggatctcgacgctctcccttatgcgactcctgcattaggaagcagcccagtagtaggttgaggccgttgagcaccgccgccgcaaggaatggtgcatgcaaggagatggcgcccaacagtcccccggccacggggcctgccaccatacccacgccgaaacaagcgctcatgagcccgaagtggcgagcccgatcttccccatcggtgatgtcggcgatataggcgccagcaaccgcacctgtggcgccggtgatgccggccacgatgcgtccggcgtagaggatcgagatctcgatcccgcgaaattaatacgactcactataggggaattgtgagcggataacaattcccctctagaaataattttgtttaactttaagaaggagatatacatatgccttactccagtgagtcgaaggaaaaagaaacacactcaaaagaaaccgaaagagataatgctgacccagtatttcaacgggtcagccagggcggcgtgggtgtttcaccgcctgatgaggggggagacttgtcggccggaagtaacaatgaccatttattcgcttttattcgtgaaacacacttggaagaagcccaggaattcaggctaaaagggtataacagccaggtgcccgaggttgacgagggattactgacgcagctgcgtgacgacctggcggcggccaaatcccgccagtacgttcaggcaagcgttggggggccgctgggttctcggtggctgctggaacagataggcaaaatagagcggctgacggacaagttttctgacgaagtaataaaacgctgggttaagcatgagctgccacgaaaaaacgtaggggaagccgcggggaccgagttggggagccggcgtagggctcagtcgctggccagacggttggagtcaaccatgcagacactgatccgcgttgtccataccctgcatgctatggatgactacagtaccccggaaaaacggcacgacatgctggtcgctgagcttaccggcgcgttctcctccagtgataaaaatacggtgatacaggcgctggggagaatgacggcagagacgtcaggtcatgccgcctgggcttcccttatgcaggcccggacagcggcgtgggaggccggtaagtcagccaccgtcgatgcgatgattgcgacttcacagcacgaagcagaaaaagccaataaaaaagcccgtgagcttcagggcgattcacaggctttctttagtcatgtcgccgcctatcttcagagcctctccagcgatttggcaaaagtgtcgattaacatggggcagagcacctcttcctcgactatacggaacgaagcagaaaaagccagtgagcttcagggcgattcacagactttcgttagtcatgtcgccgcctatcttcagagcctccctagcgatttggcaaaagtgccgattaacatgtggcagaatatggattttgttaagacaaaattacaagcgcaaactgcagttgcgggaatgaaagtgcatgcgcaccggcttgtccggatcgcacagcatggtcactccaccaaaacccctgcgaaggatcccgaacaggtcgttaccgattccatcatcagaagcattttatggctgtggcagcagccggccatcaaaatccagtgcgccagcactgcgttgttgtcaaaagtgggtgagctgaaaaaaattgaggggatactggcttcttacgccgtgacggatgagctgggaaacgaacaagaacgccgcaaccctccgggtgaggaggacctggatgcacagctcagggaatgggtgagcgccagccttaagcaggaaaaccccgaaaaccagcgggcggtaaaagtggtgacgctggagcggctgctgggcggtgatatcgccagtgcccgcaacctggtggaacgtctgggaaaagcggaagagggtattcagaatctgctcaggcggcagcaggttgctgtcctgaaaatgtcagttgagcgcttgcctgccgctgtttcctctctgaaggccgtggataaattactgccggatttggcaggtgacctcacggcgagtatcgccgccctgagcaacgcccttcaggcagccgaataccccgcccgcgactttagcgaagcaaaaatacaggccggctatgcacaattgtgggcgacaaaggtgaaggaaagtctgtcggcagcgtctgcacggctgaccgaaagaccgctggatgaacattcacggggcgcacgccttgccaaacattgggcaaacctcgccaaagaacggagcgtgggtaattatccgccgccggatgcacagcaggtacttgcctccctgaaggaacaggggctattagcggggaccctttcaaccggagatccggccgggtatcttttcgccacccggcttgccggtgagcttgaaaatgccggtaatggtgaattgcgattaccgatgagtccggagcaatatgttgctttagagaagggacttgttgagtatattgtaaaatggggacaacggcggatctcacaaggagtcacccgcattgttattgagttgtcctttgagcaggctctggatacggtatcgttcaacgtgtccaagctcttccggttaccttataaggtgctgaaggcctcgataaaaataccgtacaatgtcaataaggttaataattataccatgccgggccatgataagccctataaggcaatttatggcttgctgggaaaaaagcttaagcaacttggctttaatttactgacggcacccgtgcctggcgtgatgaaacttgtggctggcaccgggataaccgcaggtgcaggcgtgcataatttacgtgtcgaaaatagagagaaaacattcagcgcggtttatcaacacgtggtggaaggaaagcaaagtgaaaaaataaaaatggactccgtgaagtcgatgatttttgattcagtgctcgataccgccactacggccgcttttaaagggggacgaagagcctggcaatcaggaagaaataaaaacgacattgaaatcaatgaggtaacactttctcaagcacagcagcgccaagtggcagccaacaatgttgacactgcatgggggaatgctgctgcgaatgagaggaaggttgagccagtgagtcattcatcaccattacagcaacaaaccgatgttaggccgttctctgataagagtgaccaggatgctgctcaacctcgagtacgtaaacgggcagtggcggatatggctccccctccccctcatcaatggcataataacattcctgccaacacgacgctacagtcagaacattttgattttgatcgtgacatacgttatcagggcttctccgatgagaagaaaaaacaaacctatttacatggtattcaacttgtattgcttcagatacaaaatgatggacgctttgcacagaagatcaggaataatgcctaccttgccagtataggcgtttcgaacttagtacctgtcgatatagaaggatataaacttaaaaatacatttcttcttcctgatagcccaagtgctaaatctggagttattgttcgcttagattctgaaaatccttattactatgttggcaaagggagtgatcttttagaagacatcaaatgggccatgcctcatgatgctaatgaacagaagtatgaatatatgcctgattctgatgggaacgctcacttttaccgtctgcgcaacggttttgatatctttaatgatattaggatggggaattcaagtttcgaatatttctttaattataataatccggagccgataagcatcacgagactttcttcatatcttgcaaatactattgagggtgactataaaaacggatcgtcgcccccaaaaaacaaactattaatttccagagcgattactggtgctcatattcctgacccaggggtcactgcaaccgccgctggatatcatatcgaattcacctgggataatttgacttcagcagagtatctgaggtcattttcaaggcccttctctaccctcagtggagaaatgcagttagtgtctagctccattaatggagaaacgatacaggaaacagagctgcatgttcatcaggctgaatatataggaagctgggttgatgctactgtcggggccatcacatctttcacgccggagggatgggttctcaataccacactatcggcagcggacattgctgctgatttgacagaagataaggatcctgacccaatggcggttgctggcctggttgtaggatgcattcctggtggtcggattgcagctaaagtcggaaagttcacccgtattggcggtaaggttgttaaatacgggcttatgcttggcaataaagcggtcgacctggccatcgtagggaagagcgttaagatagctgtagacacgggtgatccactcgcaatttataaggcgcttctgatcagtggcataggtactacgaattcttacgatatggcaaagaatatgtcatcaaagctaaaaatcagcaagaaactggaagacagtgttcaattagataaaccactacaaaatctaaggggaggaagcaagcgtcctgaagagggtgaatcaacctcgcagaagcgttcacagccagatgagagtccagaaaatagtcaggaggctgtatattcaggcccctccggcagagctcgggtgacttttgaccagacgaccgaacatcatataatgcttaatagattttccagacttgtgttagctagaagttttgcagagaaaagaatacagtcttttgaacacagttcttcgaaatttaaaagcagtgacgagtttaaggtagataaaagcatacctttagatgcacaaaatgcttcacttaacgacatggcgagtaagacagataacttaattaatcagctagaacaatttacaggagataagaaagaatccatttccgccaatctgaaaaacatccagttaatgattggtgatataatggaaaatagaaacaataggaatgataatttaaatttccatacttatgtcttggttgggaaaaatacaacatatgacgaaataagtaactattatggttttgctgagtttaaattttcaataaataatggcaatcttactcttaacaaccttataggccacccttatgtcgtcattaataaataccctgaatttagagattatttgataagaaatggagtcatcacccaacccgagcttgaaccatataacataaagaatgtggctcggtatcttggctctaaagcggtgagcagtgagattggttattatgaatccattccagctactaaagtgaagattctctcgtttactggagccaatccgattacgcaaaaattaggtaatacacttcagagtatctctgatcttttttcaaaaaaacgattttcggacgaaccgaatgacgccatcactcaggatgaactatttacccgtcagactgatttatatacttatgatgagatgataaatcatctaaaaactatagtaagaacgacattcacacctgttaaaccgatagaagaaatatccagtgaaaaaactgatgcggccattaaaggaataatgaccaatggggatgcggaaataatttccgaaaacattatcgagagcaaaaatagtttagaccatgatacaagttatttttctcatgaagttatttcagctgttgatcgtgcatatgaaaaagtaaactccgtgaaatctctttttgaacgtgcagaatctcagcctgagattaaatctcaattaaaatcattaattaatgaagccactggattgaatgatgaggttatcattgatattgataaagtagatgtttctagcatatcagacatggcctataacaggtttaaagataatatcaatactctacatgactatctctctaagcaaaaatcagggggttatacatcctttgttttatttaaatatcgccagtttaatccatccaagcctgatgcctttgccatgccctatgacagtaagaaaagaatttttctggctatgttgccagaaaatcagcgccatggtggattagttgatacggtgacccatgaagcttcacataattcttcttacacattagatcatacttatatagggaacgcgcggagtaacaccggttcatttccttcctcatttgaacctccaactcgagattcgaggtatttttatgaaaatgaacgggtaggtaaactgagtgcaaagtatgctttagacttacccgaaaatgctaatatcacccaaaatcaactagcgcaggcagatattctgttaagaaacagcaggttgactaaagcagatacgcttctgaatgctgcagaatataatgcttatatgattgacgttctaagccgggtaaaaataaacggctcacatattgagtttgaagaaaactcatccagaagcaaacgctctgtttccggaggaaatcataaacttgatgatataattatactggcttcgatgaacgctacgcttcctaggagggaggggggggaatttgagtcatctaccttcaagaaaacattaacggaatttataaacaagggtacgaccagcagtcaggttgatcctgtttatgcatcctatctaccagcgtttaataccattgtagatagcgagggtattacattgcaacaggtgaaagacttaaaatcagctctgcccgcaaccggcaacgatctgagggctcaagccagatataactatgcggtgctacaatatttatctgggtcggcaggaattaagctaccaattgatactgatgtaatacgaaatagcattaatgatgatctgaatattgcaagttgcgtagataactgtaaaaaggcagcctcacaaaggcttgagttgttgaaggcggtgccagaatatttatctgggccggaagcaattcacgcacagattgatactaatttaatgataaatagaattaagaacactctgaaacatgaaaattacacatatgatcttaaagtaaatgaaagggattatcttttattacagttggaacaaaaatatatagcttcgagtaaacctcctaaagtcggagctcaaaaatggagtgctgacataaataaagaaattaattatttatgcgatgagatcgaagaaaaaaaacgcgaggtggtttgttgggagaataagaagaatgaatcatcacgaagacttgatttgtggagtacggcgacgaaatatttatctgacccgaaaggaattaaaccaccgattgatactgatgtaatactcaataacattaatgatgttcttaatcatgctggctacgtatataactataaagtgagagaaaaggataatcttgagaaaaagttgagtagaacccccctaacaagtcagatagaagtgaaccgtttacaaaccgagatcgcaaaaagatatagactaatagattattgggggaaaaaagcagatgaaacattactaatgtttatcttgtggaggaatgtgtttggtatgcgtaaaggcgaagagctgttcactggtgtcgtccctattctggtggaactggatggtgatgtcaacggtcataagttttccgtgcgtggcgagggtgaaggtgacgcaactaatggtaaactgacgctgaagttcatctgtactactggtaaactgccggtaccttggccgactctggtaacgacgctgacttatggtgttcagtgctttgctcgttatccggaccatatgaagcagcatgacttcttcaagtccgccatgccggaaggctatgtgcaggaacgcacgatttcctttaaggatgacggcacgtacaaaacgcgtgcggaagtgaaatttgaaggcgataccctggtaaaccgcattgagctgaaaggcattgactttaaagaagacggcaatatcctgggccataagctggaatacaattttaacagccacaatgtttacatcaccgccgataaacaaaaaaatggcattaaagcgaattttaaaattcgccacaacgtggaggatggcagcgtgcagctggctgatcactaccagcaaaacactccaatcggtgatggtcctgttctgctgccagacaatcactatctgagcacgcaaagcgttctgtctaaagatccgaacgagaaacgcgatcatatggttctgctggagttcgtaaccgcagcgggcatcacgcatggtatggatgaactgtacaaataaggtacccttgaggtgctgtttcagggaccaggaggtagtggatctgcttggagccatccacagttcgaaaaaggtggaggttctggcggtggatcaggtggaagtgcatggtctcaccctcagtttgagaaataaggatccggctgctaacaaagcccgaaaggaagctgagttggctgctgccaccgctgagcaataactagcataaccccttggggcctctaaacgggtcttgaggggttttttgctgaaaggaggaactatatccggatatcccgcaagaggcccggcagtaccggcataaccaagcctatgcctacagcatccagggtgacggtgccgaggatgacgatgagcgcattgttagatttcatacacggtgcctgactgcgttagcaatttaactgtgataaactaccgcattaaagcttatcgatgataagctgtcaaacatgagaattcttgaagacgaaagggcctcgtgatacgcctatttttataggttaatgtcatgataataatggtttcttagacgtcaggtggcacttttcggggaaatgtgcgcggaacccctatttgtttatttttctaaatacattcaaatatgtatccgctcatgagacaataaccctgataaatgcttcaataatattgaaaaaggaagagtatgagtattcaacatttccgtgtcgcccttattcccttttttgcggcattttgccttcctgtttttgctcacccagaaacgctggtgaaagtaaaagatgctgaagatcagttgggtgcacgagtgggttacatcgaactggatctcaacagcggtaagatccttgagagttttcgccccgaagaacgttttccaatgatgagcacttttaaagttctgctatgtggcgcggtattatcccgtgttgacgccgggcaagagcaactcggtcgccgcatacactattctcagaatgacttggttgagtactcaccagtcacagaaaagcatcttacggatggcatgacagtaagagaattatgcagtgctgccataaccatgagtgataacactgcggccaacttacttctgacaacgatcggaggaccgaaggagctaaccgcttttttgcacaacatgggggatcatgtaactcgccttgatcgttgggaaccggagctgaatgaagccataccaaacgacgagcgtgacaccacgatgcctgcagcaatggcaacaacgttgcgcaaactattaactggcgaactacttactctagcttcccggcaacaattaatagactggatggaggcggataaagttgcaggaccacttctgcgctcggcccttccggctggctggtttattgctgataaatctggagccggtgagcgtgggtctcgcggtatcattgcagcactggggccagatggtaagccctcccgtatcgtagttatctacacgacggggagtcaggcaactatggatgaacgaaatagacagatcgctgagataggtgcctcactgattaagcattggtaactgtcagaccaagtttactcatatatactttagattgatttaaaacttcatttttaatttaaaaggatctaggtgaagatcctttttgataatctcatgaccaaaatcccttaacgtgagttttcgttccactgagcgtcagaccccgtagaaaagatcaaaggatcttcttgagatcctttttttctgcgcgtaatctgctgcttgcaaacaaaaaaaccaccgctaccagcggtggtttgtttgccggatcaagagctaccaactctttttccgaaggtaactggcttcagcagagcgcagataccaaatactgtccttctagtgtagccgtagttaggccaccacttcaagaactctgtagcaccgcctacatacctcgctctgctaatcctgttaccagtggctgctgccagtggcgataagtcgtgtcttaccgggttggactcaagacgatagttaccggataaggcgcagcggtcgggctgaacggggggttcgtgcacacagcccagcttggagcgaacgacctacaccgaactgagatacctacagcgtgagctatgagaaagcgccacgcttcccgaagggagaaaggcggacaggtatccggtaagcggcagggtcggaacaggagagcgcacgagggagcttccagggggaaacgcctggtatctttatagtcctgtcgggtttcgccacctctgacttgagcgtcgatttttgtgatgctcgtcaggggggcggagcctatggaaaaacgccagcaacgcggcctttttacggttcctggccttttgctggccttttgctcacatgttctttcctgcgttatcccctgattctgtggataaccgtattaccgcctttgagtgagctgataccgctcgccgcagccgaacgaccgagcgcagcgagtcagtgagcgaggaagcggaagagcgcctgatgcggtattttctccttacgcatctgtgcggtatttcacaccgcatatatggtgcactctcagtacaatctgctctgatgccgcatagttaagccagtatacactccgctatcgctacgtgactgggtcatggctgcgccccgacacccgccaacacccgctgacgcgccctgacgggcttgtctgctcccggcatccgcttacagacaagctgtgaccgtctccgggagctgcatgtgtcagaggttttcaccgtcatcaccgaaacgcgcgaggcagctgcggtaaagctcatcagcgtggtcgtgaagcgattcacagatgtctgcctgttcatccgcgtccagctcgttgagtttctccagaagcgttaatgtctggcttctgataaagcgggccatgttaagggcggttttttcctgtttggtcactgatgcctccgtgtaagggggatttctgttcatgggggtaatgataccgatgaaacgagagaggatgctcacgatacgggttactgatgatgaacatgcccggttactggaacgttgtgagggtaaacaactggcggtatggatgcggcgggaccagagaaaaatcactcagggtcaatgccagcgcttcgttaatacagatgtaggtgttccacagggtagccagcagcatcctgcgatgcagatccggaacataatggtgcagggcgctgacttccgcgtttccagactttacgaaacacggaaaccgaagaccattcatgttgttgctcaggtcgcagacgttttgcagcagcagtcgcttcacgttcgctcgcgtatcggtgattcattctgctaaccagtaaggcaaccccgccagcctagccgggtcctcaacgacaggagcacgatcatgcgcacccgtggccaggacccaacgctgcccgagatgcgccgcgtgcggctgctggagatggcggacgcgatggatatgttctgccaagggttggtttgcgcattcacagttctccgcaagaattgattggctccaattcttggagtggtgaatccgttagcgaggtgccgccggcttccattcaggtcgaggtggcccggctccatgcaccgcgacgcaacgcggggaggcagacaaggtatagggcggcgcctacaatccatgccaacccgttccatgtgctcgccgaggcggcataaatcgccgtgacgatcagcggtccagtgatcgaagttaggctggtaagagccgcgagcgatccttgaagctgtccctgatggtcgtcatctacctgcctggacagcatggcctgcaacgcgggcatcccgatgccgccggaagcgagaagaatcataatggggaaggccatccagcctcgcgtcgcgaacgccagcaagacgtagcccagcgcgtcggccgccatgccggcgataatggcctgcttctcgccgaaacgtttggtggcgggaccagtgacgaaggcttgagcgagggcgtgcaagattccgaataccgcaagcgacaggccgatcatcgtcgcgctccagcgaaagcggtcctcgccgaaaatgacccagagcgctgccggcacctgtcctacgagttgcatgataaagaagacagtcataagtgcggcgacgatagtcatgccccgcgcccaccggaaggagctgactgggttgaaggctctcaagggcatcggtcgagatcccggtgcctaatgagtgagctaacttacattaattgcgttgcgctcactgcccgctttccagtcgggaaacctgtcgtgccagctgcattaatgaatcggccaacgcgcggggagaggcggtttgcgtattgggcgccagggtggtttttcttttcaccagtgagacgggcaacagctgattgcccttcaccgcctggccctgagagagttgcagcaagcggtccacgctggtttgccccagcaggcgaaaatcctgtttgatggtggttaacggcgggatataacatgagctgtcttcggtatcgtcgtatcccactaccgagatatccgcaccaacgcgcagcccggactcggtaatggcgcgcattgcgcccagcgccatctgatcgttggcaaccagcatcgcagtgggaacgatgccctcattcagcatttgcatggtttgttgaaaaccggacatggcactccagtcgccttcccgttccgctatcggctgaatttgattgcgagtgagatatttatgccagccagccagacgcagacgcgccgagacagaacttaatgggcccgctaacagcgcgatttgctggtgacccaatgcgaccagatgctccacgcccagtcgcgtaccgtcttcatgggagaaaataatactgttgatgggtgtc

SEQ ID NO: 176 - protein, 2366 aa, Serratia entomophila; identical to SEQ ID NO: 19

SEQ ID NO: 177 - protein, 238 aa, Serratia entomophila
MRKGEELFTGVVPILVELDGDVNGHKFSVRGEGEGDATNGKLTLKFICTTGKLPVPWPTLVTTLTYGVQCFARYPDHMKQHDFFKSAMPEGYVQERTISFKDDGTYKTRAEVKFEGDTLVNRIELKGIDFKEDGNILGHKLEYNFNSHNVYITADKQKNGIKANFKIRHNVEDGSVQLADHYQQNTPIGDGPVLLPDNHYLSTQSVLSKDPNEKRDHMVLLEFVTAAGITHGMDELYK

SEQ ID NO: 178 - DNA, 12874 bp, Serratia entomophila
  primer_bind 5274..5317: note = primer p11a_01_RV
  primer_bind 5298..5342: note = primer Afp18_pET11a_C-3CTS_FW
  primer_bind 12378..12435: note = primer Afp18_pET11a_C-3CTS_RV
  primer_bind 12416..12433: note = primer pET11a_C3CTS_lin_FW
  source 1..12874: mol_type = other DNA
  CDS 5318..12415: note = SEAfp18
  CDS 12416..12550: note = C-terminal Twin Strep Tag
ttcttgaagacgaaagggcctcgtgatacgcctatttttataggttaatgtcatgataataatggtttcttagacgtcaggtggcacttttcggggaaatgtgcgcggaacccctatttgtttatttttctaaatacattcaaatatgtatccgctcatgagacaataaccctgataaatgcttcaataatattgaaaaaggaagagtatgagtattcaacatttccgtgtcgcccttattcccttttttgcggcattttgccttcctgtttttgctcacccagaaacgctggtgaaagtaaaagatgctgaagatcagttgggtgcacgagtgggttacatcgaactggatctcaacagcggtaagatccttgagagttttcgccccgaagaacgttttccaatgatgagcacttttaaagttctgctatgtggcgcggtattatcccgtgttgacgccgggcaagagcaactcggtcgccgcatacactattctcagaatgacttggttgagtactcaccagtcacagaaaagcatcttacggatggcatgacagtaagagaattatgcagtgctgccataaccatgagtgataacactgcggccaacttacttctgacaacgatcggaggaccgaaggagctaaccgcttttttgcacaacatgggggatcatgtaactcgccttgatcgttgggaaccggagctgaatgaagccataccaaacgacgagcgtgacaccacgatgcctgcagcaatggcaacaacgttgcgcaaactattaactggcgaactacttactctagcttcccggcaacaattaatagactggatggaggcggataaagttgcaggaccacttctgcgctcggcccttccggctggctggtttattgctgataaatctggagccggtgagcgtgggtctcgcggtatcattgcagcactggggccagatggtaagccctcccgtatcgtagttatctacacgacggggagtcaggcaactatggatgaacgaaatagacagatcgctgagataggtgcctcactgattaagcattggtaactgtcagaccaagtttactcatatatactttagattgatttaaaacttcatttttaatttaaaaggatctaggtgaagatcctttttgataatctcatgaccaaaatcccttaacgtgagttttcgttccactgagcgtcagaccccgtagaaaagatcaaaggatcttcttgagatcctttttttctgcgcgtaatctgctgcttgcaaacaaaaaaaccaccgctaccagcggtggtttgtttgccggatcaagagctaccaactctttttccgaaggtaactggcttcagcagagcgcagataccaaatactgtccttctagtgtagccgtagttaggccaccacttcaagaactctgtagcaccgcctacatacctcgctctgctaatcctgttaccagtggctgctgccagtggcgataagtcgtgtcttaccgggttggactcaagacgatagttaccggataaggcgcagcggtcgggctgaacggggggttcgtgcacacagcccagcttggagcgaacgacctacaccgaactgagatacctacagcgtgagctatgagaaagcgccacgcttcccgaagggagaaaggcggacaggtatccggtaagcggcagggtcggaacaggagagcgcacgagggagcttccagggggaaacgcctggtatctttatagtcctgtcgggtttcgccacctctgacttgagcgtcgatttttgtgatgctcgtcaggggggcggagcctatggaaaaacgccagcaacgcggcctttttacggttcctggccttttgctggccttttgctcacatgttctttcctgcgttatcccctgattctgtggataaccgtattaccgcctttgagtgagctgataccgctcgccgcagccgaacgaccgagcgcagcgagtcagtgagcgaggaagcggaagagcgcctgatgcggtattttctccttacgcatctgtgcggtatttcacaccgcatatatggtgcactctcagtacaatctgctctgatgccgcatagttaagccagtatacactccgctatcgctacgtgactgggtcatggctgcgccccgacacccgccaacacccgctgacgcgccctgacgggcttgtctgctcccggcatccgcttacagacaagctgtgaccgtctccgggagctgcatgtgtcagaggttttcaccgtcatcaccgaaacgcgcgaggcagctgcggtaaagctcatcagcgtggtcgtgaagcgattcacagatgtctgcctgttcatccgcgtccagctcgttgagtttctccagaagcgttaatgtctggcttctgataaagcgggccatgttaagggcggttttttcctgtttggtcactgatgcctccgtgtaagggggatttctgttcatgggggtaatgataccgatgaaacgagagaggatgctcacgatacgggttactgatgatgaacatgcccggttactggaacgttgtgagggtaaacaactggcggtatggatgcggcgggaccagagaaaaatcactcagggtcaatgccagcgcttcgttaatacagatgtaggtgttccacagggtagccagcagcatcctgcgatgcagatccggaacataatggtgcagggcgctgacttccgcgtttccagactttacgaaacacggaaaccgaagaccattcatgttgttgctcaggtcgcagacgttttgcagcagcagtcgcttcacgttcgctcgcgtatcggtgattcattctgctaaccagtaaggcaaccccgccagcctagccgggtcctcaacgacaggagcacgatcatgcgcacccgtggccaggacccaacgctgcccgagatgcgccgcgtgcggctgctggagatggcggacgcgatggatatgttctgccaagggttggtttgcgcattcacagttctccgcaagaattgattggctccaattcttggagtggtgaatccgttagcgaggtgccgccggcttccattcaggtcgaggtggcccggctccatgcaccgcgacgcaacgcggggaggcagacaaggtatagggcggcgcctacaatccatgccaacccgttccatgtgctcgccgaggcggcataaatcgccgtgacgatcagcggtccagtgatcgaagttaggctggtaagagccgcgagcgatccttgaagctgtccctgatggtcgtcatctacctgcctggacagcatggcctgcaacgcgggcatcccgatgccgccggaagcgagaagaatcataatggggaaggccatccagcctcgcgtcgcgaacgccagcaagacgtagcccagcgcgtcggccgccatgccggcgataatggcctgcttctcgccgaaacgtttggtggcgggaccagtgacgaaggcttgagcgagggcgtgcaagattccgaataccgcaagcgacaggccgatcatcgtcgcgctccagcgaaagcggtcctcgccgaaaatgacccagagcgctgccggcacctgtcctacgagttgcatgataaagaagacagtcataagtgcggcgacgatagtcatgccccgcgcccaccggaaggagctgactgggttgaaggctctcaagggcatcggtcgagatcccggtgcctaatgagtgagctaacttacattaattgcgttgcgctcactgcccgctttccagtcgggaaacctgtcgtgccagctgcattaatgaatcggccaacgcgcggggagaggcggtttgcgtattgggcgccagggtggtttttcttttcaccagtgagacgggcaacagctgattgcccttcaccgcctggccctgagagagttgcagcaagcggtccacgctggtttgccccagcaggcgaaaatcctgtttgatggtggttaacggcgggatataacatgagctgtcttcggtatcgtcgtatcccactaccgagatatccgcaccaacgcgcagcccggactcggtaatggcgcgcattgcgcccagcgccatctgatcgttggcaaccagcatcgcagtgggaacgatgccctcattcagcatttgcatggtttgttgaaaaccggacatggcactccagtcgccttcccgttccgctatcggctgaatttgattgcgagtgagatatttatgccagccagccagacgcagacgcgccgagacagaacttaatgggcccgctaacagcgcgatttgctggtgacccaatgcgaccagatgctccacgcccagtcgcgtaccgtcttcatgggagaaaataatactgttgatgggtgtctggtcagagacatcaagaaataacgccggaacattagtgcaggcagcttccacagcaatggcatcctggtcatccagcggatagttaatgatcagcccactgacgcgttgcgcgagaagattgtgcaccgccgctttacaggcttcgacgccgcttcgttctaccatcgacaccaccacgctggcacccagttgatcggcgcgagatttaatcgccgcgacaatttgcgacggcgcgtgcagggccagactggaggtggcaacgccaatcagcaacgactgtttgcccgccagttgttgtgccacgcggttgggaatgtaattcagctccgccatcgccgcttccactttttcccgcgttttcgcagaaacgtggctggcctggttcaccacgcgggaaacggtctgataagagacaccggcatactctgcgacatcgtataacgttactggtttcacattcaccaccctgaattgactctcttccgggcgctatcatgccataccgcgaaaggttttgcgccattcgatggtgtccgggatctcgacgctctcccttatgcgactcctgcattaggaagcagcccagtagtaggttgaggccgttgagcaccgccgccgcaaggaatggtgcatgcaaggagatggcgcccaacagtcccccggccacggggcctgccaccatacccacgccgaaacaagcgctcatgagcccgaagtggcgagcccgatcttccccatcggtgatgtcggcgatataggcgccagcaaccgcacctgtggcgccggtgatgccggccacgatgcgtccggcgtagaggatcgagatctcgatcccgcgaaattaatacgactcactataggggaattgtgagcggataacaattcccctctagaaataattttgtttaactttaagaaggagatatacatatgccttactccagtgagtcgaaggaaaaagaaacacactcaaaagaaaccgaaagagataatgctgacccagtatttcaacgggtcagccagggcggcgtgggtgtttcaccgcctgatgaggggggagacttgtcggccggaagtaacaatgaccatttattcgcttttattcgtgaaacacacttggaagaagcccaggaattcaggctaaaagggtataacagccaggtgcccgaggttgacgagggattactgacgcagctgcgtgacgacctggcggcggccaaatcccgccagtacgttcaggcaagcgttggggggccgctgggttctcggtggctgctggaacagataggcaaaatagagcggctgacggacaagttttctgacgaagtaataaaacgctgggttaagcatgagctgccacgaaaaaacgtaggggaagccgcggggaccgagttggggagccggcgtagggctcagtcgctggccagacggttggagtcaaccatgcagacactgatccgcgttgtccataccctgcatgctatggatgactacagtaccccggaaaaacggcacgacatgctggtcgctgagcttaccggcgcgttctcctccagtgataaaaatacggtgatacaggcgctggggagaatgacggcagagacgtcaggtcatgccgcctgggcttcccttatgcaggcccggacagcggcgtgggaggccggtaagtcagccaccgtcgatgcgatgattgcgacttcacagcacgaagcagaaaaagccaataaaaaagcccgtgagcttcagggcgattcacaggctttctttagtcatgtcgccgcctatcttcagagcctctccagcgatttggcaaaagtgtcgattaacatggggcagagcacctcttcctcgactatacggaacgaagcagaaaaagccagtgagcttcagggcgattcacagactttcgttagtcatgtcgccgcctatcttcagagcctccctagcgatttggcaaaagtgccgattaacatgtggcagaatatggattttgttaagacaaaattacaagcgcaaactgcagttgcgggaatgaaagtgcatgcgcaccggcttgtccggatcgcacagcatggtcactccaccaaaacccctgcgaaggatcccgaacaggtcgttaccgattccatcatcagaagcattttatggctgtggcagcagccggccatcaaaatccagtgcgccagcactgcgttgttgtcaaaagtgggtgagctgaaaaaaattgaggggatactggcttcttacgccgtgacggatgagctgggaaacgaacaagaacgccgcaaccctccgggtgaggaggacctggatgcacagctcagggaatgggtgagcgccagccttaagcaggaaaaccccgaaaaccagcgggcggtaaaagtggtgacgctggagcggctgctgggcggtgatatcgccagtgcccgcaacctggtggaacgtctgggaaaagcggaagagggtattcagaatctgctcaggcggcagcaggttgctgtcctgaaaatgtcagttgagcgcttgcctgccgctgtttcctctctgaaggccgtggataaattactgccggatttggcaggtgacctcacggcgagtatcgccgccctgagcaacgcccttcaggcagccgaataccccgcccgcgactttagcgaagcaaaaatacaggccggctatgcacaattgtgggcgacaaaggtgaaggaaagtctgtcggcagcgtctgcacggctgaccgaaagaccgctggatgaacattcacggggcgcacgccttgccaaacattgggcaaacctcgccaaagaacggagcgtgggtaattatccgccgccggatgcacagcaggtacttgcctccctgaaggaacaggggctattagcggggaccctttcaaccggagatccggccgggtatcttttcgccacccggcttgccggtgagcttgaaaatgccggtaatggtgaattgcgattaccgatgagtccggagcaatatgttgctttagagaagggacttgttgagtatattgtaaaatggggacaacggcggatctcacaaggagtcacccgcattgttattgagttgtcctttgagcaggctctggatacggtatcgttcaacgtgtccaagctcttccggttaccttataaggtgctgaaggcctcgataaaaataccgtacaatgtcaataaggttaataattataccatgccgggccatgataagccctataaggcaatttatggcttgctgggaaaaaagcttaagcaacttggctttaatttactgacggcacccgtgcctggcgtgatgaaacttgtggctggcaccgggataaccgcaggtgcaggcgtgcataatttacgtgtcgaaaatagagagaaaacattcagcgcggtttatcaacacgtggtggaaggaaagcaaagtgaaaaaataaaaatggactccgtgaagtcgatgatttttgattcagtgctcgataccgccactacggccgcttttaaagggggacgaagagcctggcaatcaggaagaaataaaaacgacattgaaatcaatgaggtaacactttctcaagcacagcagcgccaagtggcagccaacaatgttgacactgcatgggggaatgctgctgcgaatgagaggaaggttgagccagtgagtcattcatcaccattacagcaacaaaccgatgttaggccgttctctgataagagtgaccaggatgctgctcaacctcgagtacgtaaacgggcagtggcggatatggctccccctccccctcatcaatggcataataacattcctgccaacacgacgctacagtcagaacattttgattttgatcgtgacatacgttatcagggcttctccgatgagaagaaaaaacaaacctatttacatggtattcaacttgtattgcttcagatacaaaatgatggacgctttgcacagaagatcaggaataatgcctaccttgccagtataggcgtttcgaacttagtacctgtcgatatagaaggatataaacttaaaaatacatttcttcttcctgatagcccaagtgctaaatctggagttattgttcgcttagattctgaaaatccttattactatgttggcaaagggagtgatcttttagaagacatcaaatgggccatgcctcatgatgctaatgaacagaagtatgaatatatgcctgattctgatgggaacgctcacttttaccgtctgcgcaacggttttgatatctttaatgatattaggatggggaattcaagtttcgaatatttctttaattataataatccggagccgataagcatcacgagactttcttcatatcttgcaaatactattgagggtgactataaaaacggatcgtcgcccccaaaaaacaaactattaatttccagagcgattactggtgctcatattcctgacccaggggtcactgcaaccgccgctggatatcatatcgaattcacctgggataatttgacttcagcagagtatctgaggtcattttcaaggcccttctctaccctcagtggagaaatgcagttagtgtctagctccattaatggagaaacgatacaggaaacagagctgcatgttcatcaggctgaatatataggaagctgggttgatgctactgtcggggccatcacatctttcacgccggagggatgggttctcaataccacactatcggcagcggacattgctgctgatttgacagaagataaggatcctgacccaatggcggttgctggcctggttgtaggatgcattcctggtggtcggattgcagctaaagtcggaaagttcacccgtattggcggtaaggttgttaaatacgggcttatgcttggcaataaagcggtcgacctggccatcgtagggaagagcgttaagatagctgtagacacgggtgatccactcgcaatttataaggcgcttctgatcagtggcataggtactacgaattcttacgatatggcaaagaatatgtcatcaaagctaaaaatcagcaagaaactggaagacagtgttcaattagataaaccactacaaaatctaaggggaggaagcaagcgtcctgaagagggtgaatcaacctcgcagaagcgttcacagccagatgagagtccagaaaatagtcaggaggctgtatattcaggcccctccggcagagctcgggtgacttttgaccagacgaccgaacatcatataatgcttaatagattttccagacttgtgttagctagaagttttgcagagaaaagaatacagtcttttgaacacagttcttcgaaatttaaaagcagtgacgagtttaaggtagataaaagcatacctttagatgcacaaaatgcttcacttaacgacatggcgagtaagacagataacttaattaatcagctagaacaatttacaggagataagaaagaatccatttccgccaatctgaaaaacatccagttaatgattggtgatataatggaaaatagaaacaataggaatgataatttaaatttccatacttatgtcttggttgggaaaaatacaacatatgacgaaataagtaactattatggttttgctgagtttaaattttcaataaataatggcaatcttactcttaacaaccttataggccacccttatgtcgtcattaataaataccctgaatttagagattatttgataagaaatggagtcatcacccaacccgagcttgaaccatataacataaagaatgtggctcggtatcttggctctaaagcggtgagcagtgagattggttattatgaatccattccagctactaaagtgaagattctctcgtttactggagccaatccgattacgcaaaaattaggtaatacacttcagagtatctctgatcttttttcaaaaaaacgattttcggacgaaccgaatgacgccatcactcaggatgaactatttacccgtcagactgatttatatacttatgatgagatgataaatcatctaaaaactatagtaagaacgacattcacacctgttaaaccgatagaagaaatatccagtgaaaaaactgatgcggccattaaaggaataatgaccaatggggatgcggaaataatttccgaaaacattatcgagagcaaaaatagtttagaccatgatacaagttatttttctcatgaagttatttcagctgttgatcgtgcatatgaaaaagtaaactccgtgaaatctctttttgaacgtgcagaatctcagcctgagattaaatctcaattaaaatcattaattaatgaagccactggattgaatgatgaggttatcattgatattgataaagtagatgtttctagcatatcagacatggcctataacaggtttaaagataatatcaatactctacatgactatctctctaagcaaaaatcagggggttatacatcctttgttttatttaaatatcgccagtttaatccatccaagcctgatgcctttgccatgccctatgacagtaagaaaagaatttttctggctatgttgccagaaaatcagcgccatggtggattagttgatacggtgacccatgaagcttcacataattcttcttacacattagatcatacttatatagggaacgcgcggagtaacaccggttcatttccttcctcatttgaacctccaactcgagattcgaggtatttttatgaaaatgaacgggtaggtaaactgagtgcaaagtatgctttagacttacccgaaaatgctaatatcacccaaaatcaactagcgcaggcagatattctgttaagaaacagcaggttgactaaagcagatacgcttctgaatgctgcagaatataatgcttatatgattgacgttctaagccgggtaaaaataaacggctcacatattgagtttgaagaaaactcatccagaagcaaacgctctgtttccggaggaaatcataaacttgatgatataattatactggcttcgatgaacgctacgcttcctaggagggaggggggggaatttgagtcatctaccttcaagaaaacattaacggaatttataaacaagggtacgaccagcagtcaggttgatcctgtttatgcatcctatctaccagcgtttaataccattgtagatagcgagggtattacattgcaacaggtgaaagacttaaaatcagctctgcccgcaaccggcaacgatctgagggctcaagccagatataactatgcggtgctacaatatttatctgggtcggcaggaattaagctaccaattgatactgatgtaatacgaaatagcattaatgatgatctgaatattgcaagttgcgtagataactgtaaaaaggcagcctcacaaaggcttgagttgttgaaggcggtgccagaatatttatctgggccggaagcaattcacgcacagattgatactaatttaatgataaatagaattaagaacactctgaaacatgaaaattacacatatgatcttaaagtaaatgaaagggattatcttttattacagttggaacaaaaatatatagcttcgagtaaacctcctaaagtcggagctcaaaaatggagtgctgacataaataaagaaattaattatttatgcgatgagatcgaagaaaaaaaacgcgaggtggtttgttgggagaataagaagaatgaatcatcacgaagacttgatttgtggagtacggcgacgaaatatttatctgacccgaaaggaattaaaccaccgattgatactgatgtaatactcaataacattaatgatgttcttaatcatgctggctacgtatataactataaagtgagagaaaaggataatcttgagaaaaagttgagtagaacccccctaacaagtcagatagaagtgaaccgtttacaaaccgagatcgcaaaaagatatagactaatagattattgggggaaaaaagcagatgaaacattactaatgtttatcttgtggaggaatgtgtttggtggtacccttgaggtgctgtttcagggaccaggaggtagtggatctgcttggagccatccacagttcgaaaaaggtggaggttctggcggtggatcaggtggaagtgcatggtctcaccctcagtttgagaaataaggatccggctgctaacaaagcccgaaaggaagctgagttggctgctgccaccgctgagcaataactagcataaccccttggggcctctaaacgggtcttgaggggttttttgctgaaaggaggaactatatccggatatcccgcaagaggcccggcagtaccggcataaccaagcctatgcctacagcatccagggtgacggtgccgaggatgacgatgagcgcattgttagatttcatacacggtgcctgactgcgttagcaatttaactgtgataaactaccgcattaaagcttatcgatgataagctgtcaaacatgagaa

SEQ ID NO: 179 - protein, 2366 aa, Serratia entomophila; identical to SEQ ID NO: 19

SEQ ID NO: 180 - protein, 44 aa, Serratia entomophila
GTLEVLFQGPGGSGSAWSHPQFEKGGGSGGGSGGSAWSHPQFEK

SEQ ID NO: 181 - DNA, 8851 bp, Serratia entomophila
  primer_bind 2489..2510: note = primer SEAfp18C6_RV
  primer_bind 2491..2534: note = primer sfGFP_OHAfp18C6_FW
  primer_bind 3984..4024: note = primer sfGFP_OHAfp18C6_RV
  primer_bind 4005..4032: note = primer pET11a_C3CTS-Stop_lin_FW
  source 1..8851: mol_type = other DNA
  CDS 933..2510: note = SEAfp18-C6 C-terminal truncation K526
  CDS 2511..3224: note = superfolder GFP (sfGFP)
  CDS 3225..3818: note = Mxe GyrA intein
  CDS 3849..4007: note = C-terminal binding domain (CBD)
tggtcagagacatcaagaaataacgccggaacattagtgcaggcagcttccacagcaatggcatcctggtcatccagcggatagttaatgatcagcccactgacgcgttgcgcgagaagattgtgcaccgccgctttacaggcttcgacgccgcttcgttctaccatcgacaccaccacgctggcacccagttgatcggcgcgagatttaatcgccgcgacaatttgcgacggcgcgtgcagggccagactggaggtggcaacgccaatcagcaacgactgtttgcccgccagttgttgtgccacgcggttgggaatgtaattcagctccgccatcgccgcttccactttttcccgcgttttcgcagaaacgtggctggcctggttcaccacgcgggaaacggtctgataagagacaccggcatactctgcgacatcgtataacgttactggtttcacattcaccaccctgaattgactctcttccgggcgctatcatgccataccgcgaaaggttttgcgccattcgatggtgtccgggatctcgacgctctcccttatgcgactcctgcattaggaagcagcccagtagtaggttgaggccgttgagcaccgccgccgcaaggaatggtgcatgcaaggagatggcgcccaacagtcccccggccacggggcctgccaccatacccacgccgaaacaagcgctcatgagcccgaagtggcgagcccgatcttccccatcggtgatgtcggcgatataggcgccagcaaccgcacctgtggcgccggtgatgccggccacgatgcgtccggcgtagaggatcgagatctcgatcccgcgaaattaatacgactcactataggggaattgtgagcggataacaattcccctctagaaataattttgtttaactttaagaaggagatatacatatgccttactccagtgagtcgaaggaaaaagaaacacactcaaaagaaaccgaaagagataatgctgacccagtatttcaacgggtcagccagggcggcgtgggtgtttcaccgcctgatgaggggggagacttgtcggccggaagtaacaatgaccatttattcgcttttattcgtgaaacacacttggaagaagcccaggaattcaggctaaaagggtataacagccaggtgcccgaggttgacgagggattactgacgcagctgcgtgacgacctggcggcggccaaatcccgccagtacgttcaggcaagcgttggggggccgctgggttctcggtggctgctggaacagataggcaaaatagagcggctgacggacaagttttctgacgaagtaataaaacgctgggttaagcatgagctgccacgaaaaaacgtaggggaagccgcggggaccgagttggggagccggcgtagggctcagtcgctggccagacggttggagtcaaccatgcagacactgatccgcgttgtccataccctgcatgctatggatgactacagtaccccggaaaaacggcacgacatgctggtcgctgagcttaccggcgcgttctcctccagtgataaaaatacggtgatacaggcgctggggagaatgacggcagagacgtcaggtcatgccgcctgggcttcccttatgcaggcccggacagcggcgtgggaggccggtaagtcagccaccgtcgatgcgatgattgcgacttcacagcacgaagcagaaaaagccaataaaaaagcccgtgagcttcagggcgattcacaggctttctttagtcatgtcgccgcctatcttcagagcctctccagcgatttggcaaaagtgtcgattaacatggggcagagcacctcttcctcgactatacggaacgaagcagaaaaagccagtgagcttcagggcgattcacagactttcgttagtcatgtcgccgcctatcttcagagcctccctagcgatttggcaaaagtgccgattaacatgtggcagaatatggattttgttaagacaaaattacaagcgcaaactgcagttgcgggaatgaaagtgcatgcgcaccggcttgtccggatcgcacagcatggtcactccaccaaaacccctgcgaaggatcccgaacaggtcgttaccgattccatcatcagaagcattttatggctgtggcagcagccggccatcaaaatccagtgcgccagcactgcgttgttgtcaaaagtgggtgagctgaaaaaaattgaggggatactggcttcttacgccgtgacggatgagctgggaaacgaacaagaacgccgcaaccctccgggtgaggaggacctggatgcacagctcagggaatgggtgagcgccagccttaagcaggaaaaccccgaaaaccagcgggcggtaaaagtggtgacgctggagcggctgctgggcggtgatatcgccagtgcccgcaacctggtggaacgtctgggaaaagcggaagagggtattcagaatctgctcaggcggcagcaggttgctgtcctgaaaatgcgtaaaggcgaagagctgttcactggtgtcgtccctattctggtggaactggatggtgatgtcaacggtcataagttttccgtgcgtggcgagggtgaaggtgacgcaactaatggtaaactgacgctgaagttcatctgtactactggtaaactgccggtaccttggccgactctggtaacgacgctgacttatggtgttcagtgctttgctcgttatccggaccatatgaagcagcatgacttcttcaagtccgccatgccggaaggctatgtgcaggaacgcacgatttcctttaaggatgacggcacgtacaaaacgcgtgcggaagtgaaatttgaaggcgataccctggtaaaccgcattgagctgaaaggcattgactttaaagaagacggcaatatcctgggccataagctggaatacaattttaacagccacaatgtttacatcaccgccgataaacaaaaaaatggcattaaagcgaattttaaaattcgccacaacgtggaggatggcagcgtgcagctggctgatcactaccagcaaaacactccaatcggtgatggtcctgttctgctgccagacaatcactatctgagcacgcaaagcgttctgtctaaagatccgaacgagaaacgcgatcatatggttctgctggagttcgtaaccgcagcgggcatcacgcatggtatggatgaactgtacaaatgcatcacgggagatgcactagttgccctacccgagggcgagtcggtacgcatcgccgacatcgtgccgggtgcgcggcccaacagtgacaacgccatcgacctgaaagtccttgaccggcatggcaatcccgtgctcgccgaccggctgttccactccggcgagcatccggtgtacacggtgcgtacggtcgaaggtctgcgtgtgacgggcaccgcgaaccacccgttgttgtgtttggtcgacgtcgccggggtgccgaccctgctgtggaagctgatcgacgaaatcaagccgggcgattacgcggtgattcaacgcagcgcattcagcgtcgactgtgcaggttttgcccgcgggaaacccgaatttgcgcccacaacctacacagtcggcgtccctggactggtgcgtttcttggaagcacaccaccgagacccggacgcccaagctatcgccgacgagctgaccgacgggcggttctactacgcgaaagtcgccagtgtcaccgacgccggcgtgcagccggtgtatagccttcgtgtcgacacggcagaccacgcgtttatcacgaacgggttcgtcagccacgctactggcctcaccggtctgaactcaggcctcacgacaaatcctggtgtatccgcttggcaggtcaacacagcttatactgcgggacaattggtcacatataacggcaagacgtataaatgtttgcagccccacacctccttggcaggatgggaaccatccaacgttcctgccttgtggcagcttcaataaggtacccttgaggtgctgtttcagggaccaggaggtagtggatctgcttggagccatccacagttcgaaaaaggtggaggttctggcggtggatcaggtggaagtgcatggtctcaccctcagtttgagaaataaggatccggctgctaacaaagcccgaaaggaagctgagttggctgctgccaccgctgagcaataactagcataaccccttggggcctctaaacgggtcttgaggggttttttgctgaaaggaggaactatatccggatatcccgcaagaggcccggcagtaccggcataaccaagcctatgcctacagcatccagggtgacggtgccgaggatgacgatgagcgcattgttagatttcatacacggtgcctgactgcgttagcaatttaactgtgataaactaccgcattaaagcttatcgatgataagctgtcaaacatgagaattcttgaagacgaaagggcctcgtgatacgcctatttttataggttaatgtcatgataataatggtttcttagacgtcaggtggcacttttcggggaaatgtgcgcggaacccctatttgtttatttttctaaatacattcaaatatgtatccgctcatgagacaataaccctgataaatgcttcaataatattgaaaaaggaagagtatgagtattcaacatttccgtgtcgcccttattcccttttttgcggcattttgccttcctgtttttgctcacccagaaacgctggtgaaagtaaaagatgctgaagatcagttgggtgcacgagtgggttacatcgaactggatctcaacagcggtaagatccttgagagttttcgccccgaagaacgttttccaatgatgagcacttttaaagttctgctatgtggcgcggtattatcccgtgttgacgccgggcaagagcaactcggtcgccgcatacactattctcagaatgacttggttgagtactcaccagtcacagaaaagcatcttacggatggcatgacagtaagagaattatgcagtgctgccataaccatgagtgataacactgcggccaacttacttctgacaacgatcggaggaccgaaggagctaaccgcttttttgcacaacatgggggatcatgtaactcgccttgatcgttgggaaccggagctgaatgaagccataccaaacgacgagcgtgacaccacgatgcctgcagcaatggcaacaacgttgcgcaaactattaactggcgaactacttactctagcttcccggcaacaattaatagactggatggaggcggataaagttgcaggaccacttctgcgctcggcccttccggctggctggtttattgctgataaatctggagccggtgagcgtgggtctcgcggtatcattgcagcactggggccagatggtaagccctcccgtatcgtagttatctacacgacggggagtcaggcaactatggatgaacgaaatagacagatcgctgagataggtgcctcactgattaagcattggtaactgtcagaccaagtttactcatatatactttagattgatttaaaacttcatttttaatttaaaaggatctaggtgaagatcctttttgataatctcatgaccaaaatcccttaacgtgagttttcgttccactgagcgtcagaccccgtagaaaagatcaaaggatcttcttgagatcctttttttctgcgcgtaatctgctgcttgcaaacaaaaaaaccaccgctaccagcggtggtttgtttgccggatcaagagctaccaactctttttccgaaggtaactggcttcagcagagcgcagataccaaatactgtccttctagtgtagccgtagttaggccaccacttcaagaactctgtagcaccgcctacatacctcgctctgctaatcctgttaccagtggctgctgccagtggcgataagtcgtgtcttaccgggttggactcaagacgatagttaccggataaggcgcagcggtcgggctgaacggggggttcgtgcacacagcccagcttggagcgaacgacctacaccgaactgagatacctacagcgtgagctatgagaaagcgccacgcttcccgaagggagaaaggcggacaggtatccggtaagcggcagggtcggaacaggagagcgcacgagggagcttccagggggaaacgcctggtatctttatagtcctgtcgggtttcgccacctctgacttgagcgtcgatttttgtgatgctcgtcaggggggcggagcctatggaaaaacgccagcaacgcggcctttttacggttcctggccttttgctggccttttgctcacatgttctttcctgcgttatcccctgattctgtggataaccgtattaccgcctttgagtgagctgataccgctcgccgcagccgaacgaccgagcgcagcgagtcagtgagcgaggaagcggaagagcgcctgatgcggtattttctccttacgcatctgtgcggtatttcacaccgcatatatggtgcactctcagtacaatctgctctgatgccgcatagttaagccagtatacactccgctatcgctacgtgactgggtcatggctgcgccccgacacccgccaacacccgctgacgcgccctgacgggcttgtctgctcccggcatccgcttacagacaagctgtgaccgtctccgggagctgcatgtgtcagaggttttcaccgtcatcaccgaaacgcgcgaggcagctgcggtaaagctcatcagcgtggtcgtgaagcgattcacagatgtctgcctgttcatccgcgtccagctcgttgagtttctccagaagcgttaatgtctggcttctgataaagcgggccatgttaagggcggttttttcctgtttggtcactgatgcctccgtgtaagggggatttctgttcatgggggtaatgataccgatgaaacgagagaggatgctcacgatacgggttactgatgatgaacatgcccggttactggaacgttgtgagggtaaacaactggcggtatggatgcggcgggaccagagaaaaatcactcagggtcaatgccagcgcttcgttaatacagatgtaggtgttccacagggtagccagcagcatcctgcgatgcagatccggaacataatggtgcagggcgctgacttccgcgtttccagactttacgaaacacggaaaccgaagaccattcatgttgttgctcaggtcgcagacgttttgcagcagcagtcgcttcacgttcgctcgcgtatcggtgattcattctgctaaccagtaaggcaaccccgccagcctagccgggtcctcaacgacaggagcacgatcatgcgcacccgtggccaggacccaacgctgcccgagatgcgccgcgtgcggctgctggagatggcggacgcgatggatatgttctgccaagggttggtttgcgcattcacagttctccgcaagaattgattggctccaattcttggagtggtgaatccgttagcgaggtgccgccggcttccattcaggtcgaggtggcccggctccatgcaccgcgacgcaacgcggggaggcagacaaggtatagggcggcgcctacaatccatgccaacccgttccatgtgctcgccgaggcggcataaatcgccgtgacgatcagcggtccagtgatcgaagttaggctggtaagagccgcgagcgatccttgaagctgtccctgatggtcgtcatctacctgcctggacagcatggcctgcaacgcgggcatcccgatgccgccggaagcgagaagaatcataatggggaaggccatccagcctcgcgtcgcgaacgccagcaagacgtagcccagcgcgtcggccgccatgccggcgataatggcctgcttctcgccgaaacgtttggtggcgggaccagtgacgaaggcttgagcgagggcgtgcaagattccgaataccgcaagcgacaggccgatcatcgtcgcgctccagcgaaagcggtcctcgccgaaaatgacccagagcgctgccggcacctgtcctacgagttgcatgataaagaagacagtcataagtgcggcgacgatagtcatgccccgcgcccaccggaaggagctgactgggttgaaggctctcaagggcatcggtcgagatcccggtgcctaatgagtgagctaacttacattaattgcgttgcgctcactgcccgctttccagtcgggaaacctgtcgtgccagctgcattaatgaatcggccaacgcgcggggagaggcggtttgcgtattgggcgccagggtggtttttcttttcaccagtgagacgggcaacagctgattgcccttcaccgcctggccctgagagagttgcagcaagcggtccacgctggtttgccccagcaggcgaaaatcctgtttgatggtggttaacggcgggatataacatgagctgtcttcggtatcgtcgtatcccactaccgagatatccgcaccaacgcgcagcccggactcggtaatggcgcgcattgcgcccagcgccatctgatcgttggcaaccagcatcgcagtgggaacgatgccctcattcagcatttgcatggtttgttgaaaaccggacatggcactccagtcgccttcccgttccgctatcggctgaatttgattgcgagtgagatatttatgccagccagccagacgcagacgcgccgagacagaacttaatgggcccgctaacagcgcgatttgctggtgacccaatgcgaccagatgctccacgcccagtcgcgtaccgtcttcatgggagaaaataatactgttgatgggtgtc

SEQ ID NO: 182 - protein, 526 aa, Serratia entomophila; identical to SEQ ID NO: 123

SEQ ID NO: 183 - protein, 238 aa, Serratia entomophila; identical to SEQ ID NO: 177

SEQ ID NO: 184 - protein, 198 aa, Serratia entomophila
CITGDALVALPEGESVRIADIVPGARPNSDNAIDLKVLDRHGNPVLADRLFHSGEHPVYTVRTVEGLRVTGTANHPLLCLVDVAGVPTLLWKLIDEIKPGDYAVIQRSAFSVDCAGFARGKPEFAPTTYTVGVPGLVRFLEAHHRDPDAQAIADELTDGRFYYAKVASVTDAGVQPVYSLRVDTADHAFITNGFVSHA

SEQ ID NO: 185 - protein, 52 aa, Serratia entomophila
TTNPGVSAWQVNTAYTAGQLVTYNGKTYKCLQPHTSLAGWEPSNVPALWQLQ

SEQ ID NO: 186 - DNA, 11584 bp, Serratia entomophila
  primer_bind 5213..5243: note = primer SEAfp18C4_RV
  primer_bind 5222..5267: note = primer sfGFP_OHAfp18C4_FW
  primer_bind 6714..6757: note = primer sfGFP_OHAfp18C4_RV
  primer_bind 6738..6765: note = primer pET11a_C3CTS-Stop_lin_FW
  source 1..11584: mol_type = other DNA
  CDS 933..5243: note = SEAfp18-C4 C-terminal truncation I1437
  CDS 5244..5957: note = superfolder GFP (sfGFP)
  CDS 5958..6551: note = Mxe GyrA intein
  CDS 6582..6740: note = C-terminal binding domain (CBD)
tggtcagagacatcaagaaataacgccggaacattagtgcaggcagcttccacagcaatggcatcctggtcatccagcggatagttaatgatcagcccactgacgcgttgcgcgagaagattgtgcaccgccgctttacaggcttcgacgccgcttcgttctaccatcgacaccaccacgctggcacccagttgatcggcgcgagatttaatcgccgcgacaatttgcgacggcgcgtgcagggccagactggaggtggcaacgccaatcagcaacgactgtttgcccgccagttgttgtgccacgcggttgggaatgtaattcagctccgccatcgccgcttccactttttcccgcgttttcgcagaaacgtggctggcctggttcaccacgcgggaaacggtctgataagagacaccggcatactctgcgacatcgtataacgttactggtttcacattcaccaccctgaattgactctcttccgggcgctatcatgccataccgcgaaaggttttgcgccattcgatggtgtccgggatctcgacgctctcccttatgcgactcctgcattaggaagcagcccagtagtaggttgaggccgttgagcaccgccgccgcaaggaatggtgcatgcaaggagatggcgcccaacagtcccccggccacggggcctgccaccatacccacgccgaaacaagcgctcatgagcccgaagtggcgagcccgatcttccccatcggtgatgtcggcgatataggcgccagcaaccgcacctgtggcgccggtgatgccggccacgatgcgtccggcgtagaggatcgagatctcgatcccgcgaaattaatacgactcactataggggaattgtgagcggataacaattcccctctagaaataattttgtttaactttaagaaggagatatacatatgccttactccagtgagtcgaaggaaaaagaaacacactcaaaagaaaccgaaagagataatgctgacccagtatttcaacgggtcagccagggcggcgtgggtgtttcaccgcctgatgaggggggagacttgtcggccggaagtaacaatgaccatttattcgcttttattcgtgaaacacacttggaagaagcccaggaattcaggctaaaagggtataacagccaggtgcccgaggttgacgagggattactgacgcagctgcgtgacgacctggcggcggccaaatcccgccagtacgttcaggcaagcgttggggggccgctgggttctcggtggctgctggaacagataggcaaaatagagcggctgacggacaagttttctgacgaagtaataaaacgctgggttaagcatgagctgccacgaaaaaacgtaggggaagccgcggggaccgagttggggagccggcgtagggctcagtcgctggccagacggttggagtcaaccatgcagacactgatccgcgttgtccataccctgcatgctatggatgactacagtaccccggaaaaacggcacgacatgctggtcgctgagcttaccggcgcgttctcctccagtgataaaaatacggtgatacaggcgctggggagaatgacggcagagacgtcaggtcatgccgcctgggcttcccttatgcaggcccggacagcggcgtgggaggccggtaagtcagccaccgtcgatgcgatgattgcgacttcacagcacgaagcagaaaaagccaataaaaaagcccgtgagcttcagggcgattcacaggctttctttagtcatgtcgccgcctatcttcagagcctctccagcgatttggcaaaagtgtcgattaacatggggcagagcacctcttcctcgactatacggaacgaagcagaaaaagccagtgagcttcagggcgattcacagactttcgttagtcatgtcgccgcctatcttcagagcctccctagcgatttggcaaaagtgccgattaacatgtggcagaatatggattttgttaagacaaaattacaagcgcaaactgcagttgcgggaatgaaagtgcatgcgcaccggcttgtccggatcgcacagcatggtcactccaccaaaacccctgcgaaggatcccgaacaggtcgttaccgattccatcatcagaagcattttatggctgtggcagcagccggccatcaaaatccagtgcgccagcactgcgttgttgtcaaaagtgggtgagctgaaaaaaattgaggggatactggcttcttacgccgtgacggatgagctgggaaacgaacaagaacgccgcaaccctccgggtgaggaggacctggatgcacagctcagggaatgggtgagcgccagccttaagcaggaaaaccccgaaaaccagcgggcggtaaaagtggtgacgctggagcggctgctgggcggtgatatcgccagtgcccgcaacctggtggaacgtctgggaaaagcggaagagggtattcagaatctgctcaggcggcagcaggttgctgtcctgaaaatgtcagttgagcgcttgcctgccgctgtttcctctctgaaggccgtggataaattactgccggatttggcaggtgacctcacggcgagtatcgccgccctgagcaacgcccttcaggcagccgaataccccgcccgcgactttagcgaagcaaaaatacaggccggctatgcacaattgtgggcgacaaaggtgaaggaaagtctgtcggcagcgtctgcacggctgaccgaaagaccgctggatgaacattcacggggcgcacgccttgccaaacattgggcaaacctcgccaaagaacggagcgtgggtaattatccgccgccggatgcacagcaggtacttgcctccctgaaggaacaggggctattagcggggaccctttcaaccggagatccggccgggtatcttttcgccacccggcttgccggtgagcttgaaaatgccggtaatggtgaattgcgattaccgatgagtccggagcaatatgttgctttagagaagggacttgttgagtatattgtaaaatggggacaacggcggatctcacaaggagtcacccgcattgttattgagttgtcctttgagcaggctctggatacggtatcgttcaacgtgtccaagctcttccggttaccttataaggtgctgaaggcctcgataaaaataccgtacaatgtcaataaggttaataattataccatgccgggccatgataagccctataaggcaatttatggcttgctgggaaaaaagcttaagcaacttggctttaatttactgacggcacccgtgcctggcgtgatgaaacttgtggctggcaccgggataaccgcaggtgcaggcgtgcataatttacgtgtcgaaaatagagagaaaacattcagcgcggtttatcaacacgtggtggaaggaaagcaaagtgaaaaaataaaaatggactccgtgaagtcgatgatttttgattcagtgctcgataccgccactacggccgcttttaaagggggacgaagagcctggcaatcaggaagaaataaaaacgacattgaaatcaatgaggtaacactttctcaagcacagcagcgccaagtggcagccaacaatgttgacactgcatgggggaatgctgctgcgaatgagaggaaggttgagccagtgagtcattcatcaccattacagcaacaaaccgatgttaggccgttctctgataagagtgaccaggatgctgctcaacctcgagtacgtaaacgggcagtggcggatatggctccccctccccctcatcaatggcataataacattcctgccaacacgacgctacagtcagaacattttgattttgatcgtgacatacgttatcagggcttctccgatgagaagaaaaaacaaacctatttacatggtattcaacttgtattgcttcagatacaaaatgatggacgctttgcacagaagatcaggaataatgcctaccttgccagtataggcgtttcgaacttagtacctgtcgatatagaaggatataaacttaaaaatacatttcttcttcctgatagcccaagtgctaaatctggagttattgttcgcttagattctgaaaatccttattactatgttggcaaagggagtgatcttttagaagacatcaaatgggccatgcctcatgatgctaatgaacagaagtatgaatatatgcctgattctgatgggaacgctcacttttaccgtctgcgcaacggttttgatatctttaatgatattaggatggggaattcaagtttcgaatatttctttaattataataatccggagccgataagcatcacgagactttcttcatatcttgcaaatactattgagggtgactataaaaacggatcgtcgcccccaaaaaacaaactattaatttccagagcgattactggtgctcatattcctgacccaggggtcactgcaaccgccgctggatatcatatcgaattcacctgggataatttgacttcagcagagtatctgaggtcattttcaaggcccttctctaccctcagtggagaaatgcagttagtgtctagctccattaatggagaaacgatacaggaaacagagctgcatgttcatcaggctgaatatataggaagctgggttgatgctactgtcggggccatcacatctttcacgccggagggatgggttctcaataccacactatcggcagcggacattgctgctgatttgacagaagataaggatcctgacccaatggcggttgctggcctggttgtaggatgcattcctggtggtcggattgcagctaaagtcggaaagttcacccgtattggcggtaaggttgttaaatacgggcttatgcttggcaataaagcggtcgacctggccatcgtagggaagagcgttaagatagctgtagacacgggtgatccactcgcaatttataaggcgcttctgatcagtggcataggtactacgaattcttacgatatggcaaagaatatgtcatcaaagctaaaaatcagcaagaaactggaagacagtgttcaattagataaaccactacaaaatctaaggggaggaagcaagcgtcctgaagagggtgaatcaacctcgcagaagcgttcacagccagatgagagtccagaaaatagtcaggaggctgtatattcaggcccctccggcagagctcgggtgacttttgaccagacgaccgaacatcatataatgcgtaaaggcgaagagctgttcactggtgtcgtccctattctggtggaactggatggtgatgtcaacggtcataagttttccgtgcgtggcgagggtgaaggtgacgcaactaatggtaaactgacgctgaagttcatctgtactactggtaaactgccggtaccttggccgactctggtaacgacgctgacttatggtgttcagtgctttgctcgttatccggaccatatgaagcagcatgacttcttcaagtccgccatgccggaaggctatgtgcaggaacgcacgatttcctttaaggatgacggcacgtacaaaacgcgtgcggaagtgaaatttgaaggcgataccctggtaaaccgcattgagctgaaaggcattgactttaaagaagacggcaatatcctgggccataagctggaatacaattttaacagccacaatgtttacatcaccgccgataaacaaaaaaatggcattaaagcgaattttaaaattcgccacaacgtggaggatggcagcgtgcagctggctgatcactaccagcaaaacactccaatcggtgatggtcctgttctgctgccagacaatcactatctgagcacgcaaagcgttctgtctaaagatccgaacgagaaacgcgatcatatggttctgctggagttcgtaaccgcagcgggcatcacgcatggtatggatgaactgtacaaatgcatcacgggagatgcactagttgccctacccgagggcgagtcggtacgcatcgccgacatcgtgccgggtgcgcggcccaacagtgacaacgccatcgacctgaaagtccttgaccggcatggcaatcccgtgctcgccgaccggctgttccactccggcgagcatccggtgtacacggtgcgtacggtcgaaggtctgcgtgtgacgggcaccgcgaaccacccgttgttgtgtttggtcgacgtcgccggggtgccgaccctgctgtggaagctgatcgacgaaatcaagccgggcgattacgcggtgattcaacgcagcgcattcagcgtcgactgtgcaggttttgcccgcgggaaacccgaatttgcgcccacaacctacacagtcggcgtccctggactggtgcgtttcttggaagcacaccaccgagacccggacgcccaagctatcgccgacgagctgaccgacgggcggttctactacgcgaaagtcgccagtgtcaccgacgccggcgtgcagccggtgtatagccttcgtgtcgacacggcagaccacgcgtttatcacgaacgggttcgtcagccacgctactggcctcaccggtctgaactcaggcctcacgacaaatcctggtgtatccgcttggcaggtcaacacagcttatactgcgggacaattggtcacatataacggcaagacgtataaatgtttgcagccccacacctccttggcaggatgggaaccatccaacgttcctgccttgtggcagcttcaataaggtacccttgaggtgctgtttcagggaccaggaggtagtggatctgcttggagccatccacagttcgaaaaaggtggaggttctggcggtggatcaggtggaagtgcatggtctcaccctcagtttgagaaataaggatccggctgctaacaaagcccgaaaggaagctgagttggctgctgccaccgctgagcaataactagcataaccccttggggcctctaaacgggtcttgaggggttttttgctgaaaggaggaactatatccggatatcccgcaagaggcccggcagtaccggcataaccaagcctatgcctacagcatccagggtgacggtgccgaggatgacgatgagcgcattgttagatttcatacacggtgcctgactgcgttagcaatttaactgtgataaactaccgcattaaagcttatcgatgataagctgtcaaacatgagaattcttgaagacgaaagggcctcgtgatacgcctatttttataggttaatgtcatgataataatggtttcttagacgtcaggtggcacttttcggggaaatgtgcgcggaacccctatttgtttatttttctaaatacattcaaatatgtatccgctcatgagacaataaccctgataaatgcttcaataatattgaaaaaggaagagtatgagtattcaacatttccgtgtcgcccttattcccttttttgcggcattttgccttcctgtttttgctcacccagaaacgctggtgaaagtaaaagatgctgaagatcagttgggtgcacgagtgggttacatcgaactggatctcaacagcggtaagatccttgagagttttcgccccgaagaacgttttccaatgatgagcacttttaaagttctgctatgtggcgcggtattatcccgtgttgacgccgggcaagagcaactcggtcgccgcatacactattctcagaatgacttggttgagtactcaccagtcacagaaaagcatcttacggatggcatgacagtaagagaattatgcagtgctgccataaccatgagtgataacactgcggccaacttacttctgacaacgatcggaggaccgaaggagctaaccgcttttttgcacaacatgggggatcatgtaactcgccttgatcgttgggaaccggagctgaatgaagccataccaaacgacgagcgtgacaccacgatgcctgcagcaatggcaacaacgttgcgcaaactattaactggcgaactacttactctagcttcccggcaacaattaatagactggatggaggcggataaagttgcaggaccacttctgcgctcggcccttccggctggctggtttattgctgataaatctggagccggtgagcgtgggtctcgcggtatcattgcagcactggggccagatggtaagccctcccgtatcgtagttatctacacgacggggagtcaggcaactatggatgaacgaaatagacagatcgctgagataggtgcctcactgattaagcattggtaactgtcagaccaagtttactcatatatactttagattgatttaaaacttcatttttaatttaaaaggatctaggtgaagatcctttttgataatctcatgaccaaaatcccttaacgtgagttttcgttccactgagcgtcagaccccgtagaaaagatcaaaggatcttcttgagatcctttttttctgcgcgtaatctgctgcttgcaaacaaaaaaaccaccgctaccagcggtggtttgtttgccggatcaagagctaccaactctttttccgaaggtaactggcttcagcagagcgcagataccaaatactgtccttctagtgtagccgtagttaggccaccacttcaagaactctgtagcaccgcctacatacctcgctctgctaatcctgttaccagtggctgctgccagtggcgataagtcgtgtcttaccgggttggactcaagacgatagttaccggataaggcgcagcggtcgggctgaacggggggttcgtgcacacagcccagcttggagcgaacgacctacaccgaactgagatacctacagcgtgagctatgagaaagcgccacgcttcccgaagggagaaaggcggacaggtatccggtaagcggcagggtcggaacaggagagcgcacgagggagcttccagggggaaacgcctggtatctttatagtcctgtcgggtttcgccacctctgacttgagcgtcgatttttgtgatgctcgtcaggggggcggagcctatggaaaaacgccagcaacgcggcctttttacggttcctggccttttgctggccttttgctcacatgttctttcctgcgttatcccctgattctgtggataaccgtattaccgcctttgagtgagctgataccgctcgccgcagccgaacgaccgagcgcagcgagtcagtgagcgaggaagcggaagagcgcctgatgcggtattttctccttacgcatctgtgcggtatttcacaccgcatatatggtgcactctcagtacaatctgctctgatgccgcatagttaagccagtatacactccgctatcgctacgtgactgggtcatggctgcgccccgacacccgccaacacccgctgacgcgccctgacgggcttgtctgctcccggcatccgcttacagacaagctgtgaccgtctccgggagctgcatgtgtcagaggttttcaccgtcatcaccgaaacgcgcgaggcagctgcggtaaagctcatcagcgtggtcgtgaagcgattcacagatgtctgcctgttcatccgcgtccagctcgttgagtttctccagaagcgttaatgtctggcttctgataaagcgggccatgttaagggcggttttttcctgtttggtcactgatgcctccgtgtaagggggatttctgttcatgggggtaatgataccgatgaaacgagagaggatgctcacgatacgggttactgatgatgaacatgcccggttactggaacgttgtgagggtaaacaactggcggtatggatgcggcgggaccagagaaaaatcactcagggtcaatgccagcgcttcgttaatacagatgtaggtgttccacagggtagccagcagcatcctgcgatgcagatccggaacataatggtgcagggcgctgacttccgcgtttccagactttacgaaacacggaaaccgaagaccattcatgttgttgctcaggtcgcagacgttttgcagcagcagtcgcttcacgttcgctcgcgtatcggtgattcattctgctaaccagtaaggcaaccccgccagcctagccgggtcctcaacgacaggagcacgatcatgcgcacccgtggccaggacccaacgctgcccgagatgcgccgcgtgcggctgctggagatggcggacgcgatggatatgttctgccaagggttggtttgcgcattcacagttctccgcaagaattgattggctccaattcttggagtggtgaatccgttagcgaggtgccgccggcttccattcaggtcgaggtggcccggctccatgcaccgcgacgcaacgcggggaggcagacaaggtatagggcggcgcctacaatccatgccaacccgttccatgtgctcgccgaggcggcataaatcgccgtgacgatcagcggtccagtgatcgaagttaggctggtaagagccgcgagcgatccttgaagctgtccctgatggtcgtcatctacctgcctggacagcatggcctgcaacgcgggcatcccgatgccgccggaagcgagaagaatcataatggggaaggccatccagcctcgcgtcgcgaacgccagcaagacgtagcccagcgcgtcggccgccatgccggcgataatggcctgcttctcgccgaaacgtttggtggcgggaccagtgacgaaggcttgagcgagggcgtgcaagattccgaataccgcaagcgacaggccgatcatcgtcgcgctccagcgaaagcggtcctcgccgaaaatgacccagagcgctgccggcacctgtcctacgagttgcatgataaagaagacagtcataagtgcggcgacgatagtcatgccccgcgcccaccggaaggagctgactgggttgaaggctctcaagggcatcggtcgagatcccggtgcctaatgagtgagctaacttacattaattgcgttgcgctcactgcccgctttccagtcgggaaacctgtcgtgccagctgcattaatgaatcggccaacgcgcggggagaggcggtttgcgtattgggcgccagggtggtttttcttttcaccagtgagacgggcaacagctgattgcccttcaccgcctggccctgagagagttgcagcaagcggtccacgctggtttgccccagcaggcgaaaatcctgtttgatggtggttaacggcgggatataacatgagctgtcttcggtatcgtcgtatcccactaccgagatatccgcaccaacgcgcagcccggactcggtaatggcgcgcattgcgcccagcgccatctgatcgttggcaaccagcatcgcagtgggaacgatgccctcattcagcatttgcatggtttgttgaaaaccggacatggcactccagtcgccttcccgttccgctatcggctgaatttgattgcgagtgagatatttatgccagccagccagacgcagacgcgccgagacagaacttaatgggcccgctaacagcgcgatttgctggtgacccaatgcgaccagatgctccacgcccagtcgcgtaccgtcttcatgggagaaaataatactgttgatgggtgtc

SEQ ID NO: 187 - protein, 1437 aa, Serratia entomophila; identical to SEQ ID NO: 38

SEQ ID NO: 188 - protein, 238 aa, Serratia entomophila; identical to SEQ ID NO: 177

SEQ ID NO: 189 - protein, 198 aa, Serratia entomophila; identical to SEQ ID NO: 184

SEQ ID NO: 190 - protein, 52 aa, Serratia entomophila; identical to SEQ ID NO: 185

SEQ ID NO: 191 - DNA, 11131 bp, Serratia entomophila
  primer_bind 5213..5243: note = primer SEAfp18C4_RV
  primer_bind 5223..5282: note = primer PLDJCVC1_08520_OHSEAfp18C4_FW
  primer_bind 6260..6304: note = primer PLDJCVC1_08520_OHpET11a_RV
  primer_bind 6285..6312: note = primer pET11a_C3CTS-Stop_lin_FW
  source 1..11131: mol_type = other DNA
  CDS 933..5243: note = SEAfp18-C4 C-terminal truncation I1437
  CDS 5244..6287: note = Photorhabdus luminescens Photopexin PluDJC_08520
tggtcagagacatcaagaaataacgccggaacattagtgcaggcagcttccacagcaatggcatcctggtcatccagcggatagttaatgatcagcccactgacgcgttgcgcgagaagattgtgcaccgccgctttacaggcttcgacgccgcttcgttctaccatcgacaccaccacgctggcacccagttgatcggcgcgagatttaatcgccgcgacaatttgcgacggcgcgtgcagggccagactggaggtggcaacgccaatcagcaacgactgtttgcccgccagttgttgtgccacgcggttgggaatgtaattcagctccgccatcgccgcttccactttttcccgcgttttcgcagaaacgtggctggcctggttcaccacgcgggaaacggtctgataagagacaccggcatactctgcgacatcgtataacgttactggtttcacattcaccaccctgaattgactctcttccgggcgctatcatgccataccgcgaaaggttttgcgccattcgatggtgtccgggatctcgacgctctcccttatgcgactcctgcattaggaagcagcccagtagtaggttgaggccgttgagcaccgccgccgcaaggaatggtgcatgcaaggagatggcgcccaacagtcccccggccacggggcctgccaccatacccacgccgaaacaagcgctcatgagcccgaagtggcgagcccgatcttccccatcggtgatgtcggcgatataggcgccagcaaccgcacctgtggcgccggtgatgccggccacgatgcgtccggcgtagaggatcgagatctcgatcccgcgaaattaatacgactcactataggggaattgtgagcggataacaattcccctctagaaataattttgtttaactttaagaaggagatatacatatgccttactccagtgagtcgaaggaaaaagaaacacactcaaaagaaaccgaaagagataatgctgacccagtatttcaacgggtcagccagggcggcgtgggtgtttcaccgcctgatgaggggggagacttgtcggccggaagtaacaatgaccatttattcgcttttattcgtgaaacacacttggaagaagcccaggaattcaggctaaaagggtataacagccaggtgcccgaggttgacgagggattactgacgcagctgcgtgacgacctggcggcggccaaatcccgccagtacgttcaggcaagcgttggggggccgctgggttctcggtggctgctggaacagataggcaaaatagagcggctgacggacaagttttctgacgaagtaataaaacgctgggttaagcatgagctgccacgaaaaaacgtaggggaagccgcggggaccgagttggggagccggcgtagggctcagtcgctggccagacggttggagtcaaccatgcagacactgatccgcgttgtccataccctgcatgctatggatgactacagtaccccggaaaaacggcacgacatgctggtcgctgagcttaccggcgcgttctcctccagtgataaaaatacggtgatacaggcgctggggagaatgacggcagagacgtcaggtcatgccgcctgggcttcccttatgcaggcccggacagcggcgtgggaggccggtaagtcagccaccgtcgatgcgatgattgcgacttcacagcacgaagcagaaaaagccaataaaaaagcccgtgagcttcagggcgattcacaggctttctttagtcatgtcgccgcctatcttcagagcctctccagcgatttggcaaaagtgtcgattaacatggggcagagcacctcttcctcgactatacggaacgaagcagaaaaagccagtgagcttcagggcgattcacagactttcgttagtcatgtcgccgcctatcttcagagcctccctagcgatttggcaaaagtgccgattaacatgtggcagaatatggattttgttaagacaaaattacaagcgcaaactgcagttgcgggaatgaaagtgcatgcgcaccggcttgtccggatcgcacagcatggtcactccaccaaaacccctgcgaaggatcccgaacaggtcgttaccgattccatcatcagaagcattttatggctgtggcagcagccggccatcaaaatccagtgcgccagcactgcgttgttgtcaaaagtgggtgagctgaaaaaaattgaggggatactggcttcttacgccgtgacggatgagctgggaaacgaacaagaacgccgcaaccctccgggtgaggaggacctggatgcacagctcagggaatgggtgagcgccagccttaagcaggaaaaccccgaaaaccagcgggcggtaaaagtggtgacgctggagcggctgctgggcggtgatatcgccagtgcccgcaacctggtggaacgtctgggaaaagcggaagagggtattcagaatctgctcaggcggcagcaggttgctgtcctgaaaatgtcagttgagcgcttgcctgccgctgtttcctctctgaaggccgtggataaattactgccggatttggcaggtgacctcacggcgagtatcgccgccctgagcaacgcccttcaggcagccgaataccccgcccgcgactttagcgaagcaaaaatacaggccggctatgcacaattgtgggcgacaaaggtgaaggaaagtctgtcggcagcgtctgcacggctgaccgaaagaccgctggatgaacattcacggggcgcacgccttgccaaacattgggcaaacctcgccaaagaacggagcgtgggtaattatccgccgccggatgcacagcaggtacttgcctccctgaaggaacaggggctattagcggggaccctttcaaccggagatccggccgggtatcttttcgccacccggcttgccggtgagcttgaaaatgccggtaatggtgaattgcgattaccgatgagtccggagcaatatgttgctttagagaagggacttgttgagtatattgtaaaatggggacaacggcggatctcacaaggagtcacccgcattgttattgagttgtcctttgagcaggctctggatacggtatcgttcaacgtgtccaagctcttccggttaccttataaggtgctgaaggcctcgataaaaataccgtacaatgtcaataaggttaataattataccatgccgggccatgataagccctataaggcaatttatggcttgctgggaaaaaagcttaagcaacttggctttaatttactgacggcacccgtgcctggcgtgatgaaacttgtggctggcaccgggataaccgcaggtgcaggcgtgcataatttacgtgtcgaaaatagagagaaaacattcagcgcggtttatcaacacgtggtggaaggaaagcaaagtgaaaaaataaaaatggactccgtgaagtcgatgatttttgattcagtgctcgataccgccactacggccgcttttaaagggggacgaagagcctggcaatcaggaagaaataaaaacgacattgaaatcaatgaggtaacactttctcaagcacagcagcgccaagtggcagccaacaatgttgacactgcatgggggaatgctgctgcgaatgagaggaaggttgagccagtgagtcattcatcaccattacagcaacaaaccgatgttaggccgttctctgataagagtgaccaggatgctgctcaacctcgagtacgtaaacgggcagtggcggatatggctccccctccccctcatcaatggcataataacattcctgccaacacgacgctacagtcagaacattttgattttgatcgtgacatacgttatcagggcttctccgatgagaagaaaaaacaaacctatttacatggtattcaacttgtattgcttcagatacaaaatgatggacgctttgcacagaagatcaggaataatgcctaccttgccagtataggcgtttcgaacttagtacctgtcgatatagaaggatataaacttaaaaatacatttcttcttcctgatagcccaagtgctaaatctggagttattgttcgcttagattctgaaaatccttattactatgttggcaaagggagtgatcttttagaagacatcaaatgggccatgcctcatgatgctaatgaacagaagtatgaatatatgcctgattctgatgggaacgctcacttttaccgtctgcgcaacggttttgatatctttaatgatattaggatggggaattcaagtttcgaatatttctttaattataataatccggagccgataagcatcacgagactttcttcatatcttgcaaatactattgagggtgactataaaaacggatcgtcgcccccaaaaaacaaactattaatttccagagcgattactggtgctcatattcctgacccaggggtcactgcaaccgccgctggatatcatatcgaattcacctgggataatttgacttcagcagagtatctgaggtcattttcaaggcccttctctaccctcagtggagaaatgcagttagtgtctagctccattaatggagaaacgatacaggaaacagagctgcatgttcatcaggctgaatatataggaagctgggttgatgctactgtcggggccatcacatctttcacgccggagggatgggttctcaataccacactatcggcagcggacattgctgctgatttgacagaagataaggatcctgacccaatggcggttgctggcctggttgtaggatgcattcctggtggtcggattgcagctaaagtcggaaagttcacccgtattggcggtaaggttgttaaatacgggcttatgcttggcaataaagcggtcgacctggccatcgtagggaagagcgttaagatagctgtagacacgggtgatccactcgcaatttataaggcgcttctgatcagtggcataggtactacgaattcttacgatatggcaaagaatatgtcatcaaagctaaaaatcagcaagaaactggaagacagtgttcaattagataaaccactacaaaatctaaggggaggaagcaagcgtcctgaagagggtgaatcaacctcgcagaagcgttcacagccagatgagagtccagaaaatagtcaggaggctgtatattcaggcccctccggcagagctcgggtgacttttgaccagacgaccgaacatcatataatgaatatatctagttatttcttcctaaatgaagaaaacattagatttaataatcaatgtttaaatacatacattggctacccccaacccatcagtaaagattggcccaacctgcttgccgggttccaaagatatattgacgatattattaatttaaatggttttttatattttttcaaaggttcactgtatcttaaatttgatatcgcgaaagcagaggtcgttgataggccaaatttcattgtggatggctggcctgggttagaaggaacagaatttgaaaatggaatagatgcagctatagaattgaccaccaacaccgtttgttttttcaaaggaaaatattgtgtagattacaccatcgattcacacacaattaagatgaatactatttcagaccggtggggaatgaccgggaaatatgcagcatttagtagcaatctggatgccattatttcatggccagatatcgatggaaattttatttattttttcaaaggggattcttttattcggttcgacccaaatttgaatgcacttgatgccgggccaatcatcatctccagcgataatgagggttggagaggattagccttcaaaaatattcaagcggcggtatcggtcgatactgatttattaggcagcaaccgagacaatagtggaggcaatagtaaagtctgtaatggaacatgtggtactaatgacacgggtaaatattgtttccagttacctcaaagtattagatttggtttgatagcctacgctaatacaaatatttcgcaaactgtaaaagtatatattgacgatcttctggtagatacattaaccggtaaagggcaaaataatttaatggcgactaaagcctacacatcaggtacaggcaaaatctgtattgagattgaaggggatggcaaaccatgtaagctacgttatttcgataatatatttgatggaaaaccgggaacagctattatcagcgctgaaaatggtaccaatagtcattacaatgatagcgtggtgttcttgaattggcctctgacataaggtacccttgaggtgctgtttcagggaccaggaggtagtggatctgcttggagccatccacagttcgaaaaaggtggaggttctggcggtggatcaggtggaagtgcatggtctcaccctcagtttgagaaataaggatccggctgctaacaaagcccgaaaggaagctgagttggctgctgccaccgctgagcaataactagcataaccccttggggcctctaaacgggtcttgaggggttttttgctgaaaggaggaactatatccggatatcccgcaagaggcccggcagtaccggcataaccaagcctatgcctacagcatccagggtgacggtgccgaggatgacgatgagcgcattgttagatttcatacacggtgcctgactgcgttagcaatttaactgtgataaactaccgcattaaagcttatcgatgataagctgtcaaacatgagaattcttgaagacgaaagggcctcgtgatacgcctatttttataggttaatgtcatgataataatggtttcttagacgtcaggtggcacttttcggggaaatgtgcgcggaacccctatttgtttatttttctaaatacattcaaatatgtatccgctcatgagacaataaccctgataaatgcttcaataatattgaaaaaggaagagtatgagtattcaacatttccgtgtcgcccttattcccttttttgcggcattttgccttcctgtttttgctcacccagaaacgctggtgaaagtaaaagatgctgaagatcagttgggtgcacgagtgggttacatcgaactggatctcaacagcggtaagatccttgagagttttcgccccgaagaacgttttccaatgatgagcacttttaaagttctgctatgtggcgcggtattatcccgtgttgacgccgggcaagagcaactcggtcgccgcatacactattctcagaatgacttggttgagtactcaccagtcacagaaaagcatcttacggatggcatgacagtaagagaattatgcagtgctgccataaccatgagtgataacactgcggccaacttacttctgacaacgatcggaggaccgaaggagctaaccgcttttttgcacaacatgggggatcatgtaactcgccttgatcgttgggaaccggagctgaatgaagccataccaaacgacgagcgtgacaccacgatgcctgcagcaatggcaacaacgttgcgcaaactattaactggcgaactacttactctagcttcccggcaacaattaatagactggatggaggcggataaagttgcaggaccacttctgcgctcggcccttccggctggctggtttattgctgataaatctggagccggtgagcgtgggtctcgcggtatcattgcagcactggggccagatggtaagccctcccgtatcgtagttatctacacgacggggagtcaggcaactatggatgaacgaaatagacagatcgctgagataggtgcctcactgattaagcattggtaactgtcagaccaagtttactcatatatactttagattgatttaaaacttcatttttaatttaaaaggatctaggtgaagatcctttttgataatctcatgaccaaaatcccttaacgtgagttttcgttccactgagcgtcagaccccgtagaaaagatcaaaggatcttcttgagatcctttttttctgcgcgtaatctgctgcttgcaaacaaaaaaaccaccgctaccagcggtggtttgtttgccggatcaagagctaccaactctttttccgaaggtaactggcttcagcagagcgcagataccaaatactgtccttctagtgtagccgtagttaggccaccacttcaagaactctgtagcaccgcctacatacctcgctctgctaatcctgttaccagtggctgctgccagtggcgataagtcgtgtcttaccgggttggactcaagacgatagttaccggataaggcgcagcggtcgggctgaacggggggttcgtgcacacagcccagcttggagcgaacgacctacaccgaactgagatacctacagcgtgagctatgagaaagcgccacgcttcccgaagggagaaaggcggacaggtatccggtaagcggcagggtcggaacaggagagcgcacgagggagcttccagggggaaacgcctggtatctttatagtcctgtcgggtttcgccacctctgacttgagcgtcgatttttgtgatgctcgtcaggggggcggagcctatggaaaaacgccagcaacgcggcctttttacggttcctggccttttgctggccttttgctcacatgttctttcctgcgttatcccctgattctgtggataaccgtattaccgcctttgagtgagctgataccgctcgccgcagccgaacgaccgagcgcagcgagtcagtgagcgaggaagcggaagagcgcctgatgcggtattttctccttacgcatctgtgcggtatttcacaccgcatatatggtgcactctcagtacaatctgctctgatgccgcatagttaagccagtatacactccgctatcgctacgtgactgggtcatggctgcgccccgacacccgccaacacccgctgacgcgccctgacgggcttgtctgctcccggcatccgcttacagacaagctgtgaccgtctccgggagctgcatgtgtcagaggttttcaccgtcatcaccgaaacgcgcgaggcagctgcggtaaagctcatcagcgtggtcgtgaagcgattcacagatgtctgcctgttcatccgcgtccagctcgttgagtttctccagaagcgttaatgtctggcttctgataaagcgggccatgttaagggcggttttttcctgtttggtcactgatgcctccgtgtaagggggatttctgttcatgggggtaatgataccgatgaaacgagagaggatgctcacgatacgggttactgatgatgaacatgcccggttactggaacgttgtgagggtaaacaactggcggtatggatgcggcgggaccagagaaaaatcactcagggtcaatgccagcgcttcgttaatacagatgtaggtgttccacagggtagccagcagcatcctgcgatgcagatccggaacataatggtgcagggcgctgacttccgcgtttccagactttacgaaacacggaaaccgaagaccattcatgttgttgctcaggtcgcagacgttttgcagcagcagtcgcttcacgttcgctcgcgtatcggtgattcattctgctaaccagtaaggcaaccccgccagcctagccgggtcctcaacgacaggagcacgatcatgcgcacccgtggccaggacccaacgctgcccgagatgcgccgcgtgcggctgctggagatggcggacgcgatggatatgttctgccaagggttggtttgcgcattcacagttctccgcaagaattgattggctccaattcttggagtggtgaatccgttagcgaggtgccgccggcttccattcaggtcgaggtggcccggctccatgcaccgcgacgcaacgcggggaggcagacaaggtatagggcggcgcctacaatccatgccaacccgttccatgtgctcgccgaggcggcataaatcgccgtgacgatcagcggtccagtgatcgaagttaggctggtaagagccgcgagcgatccttgaagctgtccctgatggtcgtcatctacctgcctggacagcatggcctgcaacgcgggcatcccgatgccgccggaagcgagaagaatcataatggggaaggccatccagcctcgcgtcgcgaacgccagcaagacgtagcccagcgcgtcggccgccatgccggcgataatggcctgcttctcgccgaaacgtttggtggcgggaccagtgacgaaggcttgagcgagggcgtgcaagattccgaataccgcaagcgacaggccgatcatcgtcgcgctccagcgaaagcggtcctcgccgaaaatgacccagagcgctgccggcacctgtcctacgagttgcatgataaagaagacagtcataagtgcggcgacgatagtcatgccccgcgcccaccggaaggagctgactgggttgaaggctctcaagggcatcggtcgagatcccggtgcctaatgagtgagctaacttacattaattgcgttgcgctcactgcccgctttccagtcgggaaacctgtcgtgccagctgcattaatgaatcggccaacgcgcggggagaggcggtttgcgtattgggcgccagggtggtttttcttttcaccagtgagacgggcaacagctgattgcccttcaccgcctggccctgagagagttgcagcaagcggtccacgctggtttgccccagcaggcgaaaatcctgtttgatggtggttaacggcgggatataacatgagctgtcttcggtatcgtcgtatcccactaccgagatatccgcaccaacgcgcagcccggactcggtaatggcgcgcattgcgcccagcgccatctgatcgttggcaaccagcatcgcagtgggaacgatgccctcattcagcatttgcatggtttgttgaaaaccggacatggcactccagtcgccttcccgttccgctatcggctgaatttgattgcgagtgagatatttatgccagccagccagacgcagacgcgccgagacagaacttaatgggcccgctaacagcgcgatttgctggtgacccaatgcgaccagatgctccacgcccagtcgcgtaccgtcttcatgggagaaaataatactgttgatgggtgtc

SEQ ID NO: 192 - protein, 1437 aa, Serratia entomophila; identical to SEQ ID NO: 38

SEQ ID NO: 193 - protein, 347 aa, Serratia entomophila; identical to SEQ ID NO: 79

SEQ ID NO: 194 - DNA, 12223 bp, Serratia entomophila
  primer_bind 2489..2510: note = primer SEAfp18C6_RV
  primer_bind 2491..2542: note = primer YRAfp17_aa502_OHSEAfp18C6_FW
  primer_bind 7348..7399: note = primer YR_Afp17_p11a_stop_RVpubl
  primer_bind 7377..7404: note = primer pET11a_C3CTS-Stop_lin_FW
  source 1..12223: mol_type = other DNA
  CDS 933..2510: note = SEAfp18-C6 C-terminal truncation K526
  CDS 2511..7379: note = Yersinia ruckeri Afp17 (502-2123 amino acids, C6-YR)
tggtcagagacatcaagaaataacgccggaacattagtgcaggcagcttccacagcaatggcatcctggtcatccagcggatagttaatgatcagcccactgacgcgttgcgcgagaagattgtgcaccgccgctttacaggcttcgacgccgcttcgttctaccatcgacaccaccacgctggcacccagttgatcggcgcgagatttaatcgccgcgacaatttgcgacggcgcgtgcagggccagactggaggtggcaacgccaatcagcaacgactgtttgcccgccagttgttgtgccacgcggttgggaatgtaattcagctccgccatcgccgcttccactttttcccgcgttttcgcagaaacgtggctggcctggttcaccacgcgggaaacggtctgataagagacaccggcatactctgcgacatcgtataacgttactggtttcacattcaccaccctgaattgactctcttccgggcgctatcatgccataccgcgaaaggttttgcgccattcgatggtgtccgggatctcgacgctctcccttatgcgactcctgcattaggaagcagcccagtagtaggttgaggccgttgagcaccgccgccgcaaggaatggtgcatgcaaggagatggcgcccaacagtcccccggccacggggcctgccaccatacccacgccgaaacaagcgctcatgagcccgaagtggcgagcccgatcttccccatcggtgatgtcggcgatataggcgccagcaaccgcacctgtggcgccggtgatgccggccacgatgcgtccggcgtagaggatcgagatctcgatcccgcgaaattaatacgactcactataggggaattgtgagcggataacaattcccctctagaaataattttgtttaactttaagaaggagatatacatatgccttactccagtgagtcgaaggaaaaagaaacacactcaaaagaaaccgaaagagataatgctgacccagtatttcaacgggtcagccagggcggcgtgggtgtttcaccgcctgatgaggggggagacttgtcggccggaagtaacaatgaccatttattcgcttttattcgtgaaacacacttggaagaagcccaggaattcaggctaaaagggtataacagccaggtgcccgaggttgacgagggattactgacgcagctgcgtgacgacctggcggcggccaaatcccgccagtacgttcaggcaagcgttggggggccgctgggttctcggtggctgctggaacagataggcaaaatagagcggctgacggacaagttttctgacgaagtaataaaacgctgggttaagcatgagctgccacgaaaaaacgtaggggaagccgcggggaccgagttggggagccggcgtagggctcagtcgctggccagacggttggagtcaaccatgcagacactgatccgcgttgtccataccctgcatgctatggatgactacagtaccccggaaaaacggcacgacatgctggtcgctgagcttaccggcgcgttctcctccagtgataaaaatacggtgatacaggcgctggggagaatgacggcagagacgtcaggtcatgccgcctgggcttcccttatgcaggcccggacagcggcgtgggaggccggtaagtcagccaccgtcgatgcgatgattgcgacttcacagcacgaagcagaaaaagccaataaaaaagcccgtgagcttcagggcgattcacaggctttctttagtcatgtcgccgcctatcttcagagcctctccagcgatttggcaaaagtgtcgattaacatggggcagagcacctcttcctcgactatacggaacgaagcagaaaaagccagtgagcttcagggcgattcacagactttcgttagtcatgtcgccgcctatcttcagagcctccctagcgatttggcaaaagtgccgattaacatgtggcagaatatggattttgttaagacaaaattacaagcgcaaactgcagttgcgggaatgaaagtgcatgcgcaccggcttgtccggatcgcacagcatggtcactccaccaaaacccctgcgaaggatcccgaacaggtcgttaccgattccatcatcagaagcattttatggctgtggcagcagccggccatcaaaatccagtgcgccagcactgcgttgttgtcaaaagtgggtgagctgaaaaaaattgaggggatactggcttcttacgccgtgacggatgagctgggaaacgaacaagaacgccgcaaccctccgggtgaggaggacctggatgcacagctcagggaatgggtgagcgccagccttaagcaggaaaaccccgaaaaccagcgggcggtaaaagtggtgacgctggagcggctgctgggcggtgatatcgccagtgcccgcaacctggtggaacgtctgggaaaagcggaagagggtattcagaatctgctcaggcggcagcaggttgctgtcctgaaaatgtcagcattgagagatgaattaaaacgtgcccctgagactctggcatcaaataacataatcagtaattttgatacacgggcaaaaatagttgttgagggtttagctagcattgaaataggtatgaatcagtctgtggtacgccttgccgggcatggtgaagctggaaggaaagatctggacgaacaagtagtggcatggttgcagcgtctggaacgcataaaaggtgagttaaaaaccgatattacacaggcaacagggcagtcgatcaacaatttttcccgccaaggtatgttggccagacgaatgggagaatggaacgaagcggagaagcaacgctatctggcggcgctttctacagaagatcgggcggtagccgaaatgcaatataacacattgttttttgaggtgatccagcactaccttcccttattatccaaagagactgatccacagggcgagaggctgcttcaacgattgcgcctcgaagtgagcaatgcggctgaaggcaccactgtctaccctgcaactatggccgaaatccttgccgggatgaaaagcaccgagcaggcaataagagactggtcaggaagaaaactgctcagggtggtctttctagccgcctgtttggagggggtaaagttgatgccgaaactggctgcactgccgctacgggtagcgattaaatttgttatcacgggggcgaaagtggcgtgggctacccacaaaggacagcaggggatacgcggtggtgagggtgatgtagatgatgagataggggaatatgcaaagcgaagtttcaaaactgcgagcgtcaaagtggtgctctcacttcccccagggctggcaacgatgctgggggttgcctcgattgcactggacgtttacgagggaggactaaaaggtgcggggggaaagatagcaaaaaatattgtgggggacgctccctggcgtgcgctgaatcaaggcagcaaaatagcggccgaagcttatactactgcatcgatgaatgccgcgctgaaagaagggggagccaatccggtgagccactcatcgacattgcagcaacaaatggatgccaagccgttctttgataatagtgaccaggatgccgatcaacctcgagtcagacgtaagcgggaaatgacggatgaaattatgctgtcagatggaagtagcaggagtgaagccaaagcgctcccagatgagaatgaactggataccgatcaatctaaaagcagacctgagagcgcgctagccgtcgagactctacagtcagaacattttgattttgatcgtggcatacgttatcaagacttctccgatgaacagaaaaaacaaacctatttacatggcattaaattcgtattgcttcaaatagaaaatgatggacattttgcacaaaatattagaaataatgcctatcttgccaggattggtgccaagcttgccgttcctgttgatatatatagatacaagcttaataacacctttcttcttcctgatgagatagattcaaaatctggtgttcttattcgtttggattcggaaataccttattactatgtcagtgaaggaaaagatcttttagaaaatatcgcatgggctatgccttacaatgctgctaatcgtggtcctttgaaatttagtctcgacccaggggaagtgactagtagtcacagtggagttgatatacttaataatataagatctgagaggttcaagtttgaaacatactttaattataatgctccagaggcgatgagtattgaaagtctttctgcacaactagctaatactatcgaggccgattataaatttaagaacacgagcccaacaaacaaaatattaatttccagagcgattgtaggtgctcacattcctgaccctggagtcagggcaacccaaggagaatatcatattgaattcgactctgatgaattggccccagcaaagtatttgagatcattcgcaagaccattttctaccttgagtggggaaatgcagttaatatccagctccattaagggggaaacgatacaagaaacagagctacatgtacatcaggctgaatatataggaagctgggttgacgccactgcaggggcaatcatatcgtttacgccggaagggtggtttctcaatactgcgcaatcagcagcggagattactgctgatttgaccgagggtaaagatcctgacccattagcggttgctggtttgcttgtagggatcattcctggaggtaaaattgcagctaaagtaggaaagttcactcgtattggcggtaagactgttaaatacggcttgatacttggaaataaatcggtcgatctggctatcgtggggaaaagcattaagacagccgtagacactggtgagccactcgccatttatcaggcgtttctggccagtggcatgagtgttaagaattcttatgacatagcaaaaaatatgtcctcagagctaaaaattagcaagaaaatagaagaaagtgctcgactgagaaaacttaaagcactccaaaaaaatacttataaatattctatgaattcgaaaatgccagtacgcaaatttagagttggacagacagacctgctcggaaaaatacataaaggggaaattaagatatccaggaataacggaacgacttgggagaagggaaatcaactccacttgttagcgtacaggctacaaaatgccggagggggacgtctgcttccggatgtatttagagataaaatagttattggggagtacagttttaaacgtgttaaatataatcaaaaaaaattaaatgaaatgatgcgtatcgctaagatgtataccccaacatcaaatagcacagagagaatagcaaaacttcaacaaaattataagactggaaaggaaatgagtcatgcacctcagtatgacacatataatgatttatctcttggtgaaaaacttgatttatttattaactccaatactgatgcgacaactagaggggttttagcaggaaagataaatgaatccattacgaatatcaatttatatgaaacagctaagggagttgatgcctggaaaacgtcagcaaataaagcaacggatgttgttcttgccccgcaaaatattttcttaaaagggagggctggcgagtgtctgccggagtccatattaatgggttgggctttacagagtgggcaagatacaaaattagcgaaaaaattaatgaatattcattcatcatcgaatattgcagccaatcctttatataaatcactcgttgaattgcattcagatggcaatgcgtctagatttggcgagtcagtgatatctgatattaatatgaaaatgttaagtggtgctgagtcaaaactgttcccaacggaaaactcttccgttagagttgatattcctgaacatactatgttgatatcgaaagtgaataaggatggtaaaataaaatatgtattctatgatcctaattatggcatggcttattttaataaatataaagaaatgatttcgttttttaagaaaaagatcaaggggtatgatactccaaagcgatcgactagtttccgtcagttagattactcacatctttccgatattaaaataaaaggaaaaaacttgaatgaaattatagatggtgaaatcccacaaattttcaggcaagaggatgtgaatttagagggtatcacacctcaagatggtatttataggatgcttggaactcatcaacaagaaaataatacatatataaaatctcaaaataacatttatcaagttgagtgggatcaaacgacgaatacgtggagagtgtttgactctgcaaataccaatcggtccaggataactgtaccaataaaaagagataccgatggggaatggttcaagtatacagagactggtcttaagggcggagggctttttgatgagataaaaaataactggcttcagcgtaaaagatttaaaaatttacaagactttaacgatatcgtagattttgaagaaaataaatggccttctgagccaataaataaagatattcatatgatatgggttggaacacgaaatatatctgagaaaaatattggtttatctctcgaaacagcgcgaaagaactctgattataacacgacaattatttatgacagtgggatcgcagggtatgaaagcgctaaggattttatgactgaaaaatttaaagatagtaaggttacgcttgttgatttcagaaagaaaagctactttcatcaactgcaacaagagccatcttttccttattatgaacaagctattcgagataaaaaatatgcgcaagccagcgatattttaagattattggttttaaaatatgaaggcggtatatataaagatattgatgatgtacaagtgaaggcatttggctctttagcctttccgaaggggattggtgttatgagggagtatgcaccagaggcgggtaaaaccacggcttttcctaatacaccaatagcggcgacaaaaaacaacccagtggttaataaaacattagaacttgctgtagaaaattatcatcgtggagagacaaacgtattgaagttagcagggccagatgtttttactgagtctctatatcaagagataccaggaatgcgtcctcaggttttaggcgcacaattagatcagttcgaattagcaaaacggcaagcgctaggaatgcgtctcgaaaaaccaaaaggctttgcggatgaaaaactgacattgcaagaaaaagcgaaaattagacagccttatgaagcgatacgtggactttctggatatgttgacaatggtgcagatcactcttgggtcactgatatgcccggtaacagcactcaaagctcaggcctgagctaaggtacccttgaggtgctgtttcagggaccaggaggtagtggatctgcttggagccatccacagttcgaaaaaggtggaggttctggcggtggatcaggtggaagtgcatggtctcaccctcagtttgagaaataaggatccggctgctaacaaagcccgaaaggaagctgagttggctgctgccaccgctgagcaataactagcataaccccttggggcctctaaacgggtcttgaggggttttttgctgaaaggaggaactatatccggatatcccgcaagaggcccggcagtaccggcataaccaagcctatgcctacagcatccagggtgacggtgccgaggatgacgatgagcgcattgttagatttcatacacggtgcctgactgcgttagcaatttaactgtgataaactaccgcattaaagcttatcgatgataagctgtcaaacatgagaattcttgaagacgaaagggcctcgtgatacgcctatttttataggttaatgtcatgataataatggtttcttagacgtcaggtggcacttttcggggaaatgtgcgcggaacccctatttgtttatttttctaaatacattcaaatatgtatccgctcatgagacaataaccctgataaatgcttcaataatattgaaaaaggaagagtatgagtattcaacatttccgtgtcgcccttattcccttttttgcggcattttgccttcctgtttttgctcacccagaaacgctggtgaaagtaaaagatgctgaagatcagttgggtgcacgagtgggttacatcgaactggatctcaacagcggtaagatccttgagagttttcgccccgaagaacgttttccaatgatgagcacttttaaagttctgctatgtggcgcggtattatcccgtgttgacgccgggcaagagcaactcggtcgccgcatacactattctcagaatgacttggttgagtactcaccagtcacagaaaagcatcttacggatggcatgacagtaagagaattatgcagtgctgccataaccatgagtgataacactgcggccaacttacttctgacaacgatcggaggaccgaaggagctaaccgcttttttgcacaacatgggggatcatgtaactcgccttgatcgttgggaaccggagctgaatgaagccataccaaacgacgagcgtgacaccacgatgcctgcagcaatggcaacaacgttgcgcaaactattaactggcgaactacttactctagcttcccggcaacaattaatagactggatggaggcggataaagttgcaggaccacttctgcgctcggcccttccggctggctggtttattgctgataaatctggagccggtgagcgtgggtctcgcggtatcattgcagcactggggccagatggtaagccctcccgtatcgtagttatctacacgacggggagtcaggcaactatggatgaacgaaatagacagatcgctgagataggtgcctcactgattaagcattggtaactgtcagaccaagtttactcatatatactttagattgatttaaaacttcatttttaatttaaaaggatctaggtgaagatcctttttgataatctcatgaccaaaatcccttaacgtgagttttcgttccactgagcgtcagaccccgtagaaaagatcaaaggatcttcttgagatcctttttttctgcgcgtaatctgctgcttgcaaacaaaaaaaccaccgctaccagcggtggtttgtttgccggatcaagagctaccaactctttttccgaaggtaactggcttcagcagagcgcagataccaaatactgtccttctagtgtagccgtagttaggccaccacttcaagaactctgtagcaccgcctacatacctcgctctgctaatcctgttaccagtggctgctgccagtggcgataagtcgtgtcttaccgggttggactcaagacgatagttaccggataaggcgcagcggtcgggctgaacggggggttcgtgcacacagcccagcttggagcgaacgacctacaccgaactgagatacctacagcgtgagctatgagaaagcgccacgcttcccgaagggagaaaggcggacaggtatccggtaagcggcagggtcggaacaggagagcgcacgagggagcttccagggggaaacgcctggtatctttatagtcctgtcgggtttcgccacctctgacttgagcgtcgatttttgtgatgctcgtcaggggggcggagcctatggaaaaacgccagcaacgcggcctttttacggttcctggccttttgctggccttttgctcacatgttctttcctgcgttatcccctgattctgtggataaccgtattaccgcctttgagtgagctgataccgctcgccgcagccgaacgaccgagcgcagcgagtcagtgagcgaggaagcggaagagcgcctgatgcggtattttctccttacgcatctgtgcggtatttcacaccgcatatatggtgcactctcagtacaatctgctctgatgccgcatagttaagccagtatacactccgctatcgctacgtgactgggtcatggctgcgccccgacacccgccaacacccgctgacgcgccctgacgggcttgtctgctcccggcatccgcttacagacaagctgtgaccgtctccgggagctgcatgtgtcagaggttttcaccgtcatcaccgaaacgcgcgaggcagctgcggtaaagctcatcagcgtggtcgtgaagcgattcacagatgtctgcctgttcatccgcgtccagctcgttgagtttctccagaagcgttaatgtctggcttctgataaagcgggccatgttaagggcggttttttcctgtttggtcactgatgcctccgtgtaagggggatttctgttcatgggggtaatgataccgatgaaacgagagaggatgctcacgatacgggttactgatgatgaacatgcccggttactggaacgttgtgagggtaaacaactggcggtatggatgcggcgggaccagagaaaaatcactcagggtcaatgccagcgcttcgttaatacagatgtaggtgttccacagggtagccagcagcatcctgcgatgcagatccggaacataatggtgcagggcgctgacttccgcgtttccagactttacgaaacacggaaaccgaagaccattcatgttgttgctcaggtcgcagacgttttgcagcagcagtcgcttcacgttcgctcgcgtatcggtgattcattctgctaaccagtaaggcaaccccgccagcctagccgggtcctcaacgacaggagcacgatcatgcgcacccgtggccaggacccaacgctgcccgagatgcgccgcgtgcggctgctggagatggcggacgcgatggatatgttctgccaagggttggtttgcgcattcacagttctccgcaagaattgattggctccaattcttggagtggtgaatccgttagcgaggtgccgccggcttccattcaggtcgaggtggcccggctccatgcaccgcgacgcaacgcggggaggcagacaaggtatagggcggcgcctacaatccatgccaacccgttccatgtgctcgccgaggcggcataaatcgccgtgacgatcagcggtccagtgatcgaagttaggctggtaagagccgcgagcgatccttgaagctgtccctgatggtcgtcatctacctgcctggacagcatggcctgcaacgcgggcatcccgatgccgccggaagcgagaagaatcataatggggaaggccatccagcctcgcgtcgcgaacgccagcaagacgtagcccagcgcgtcggccgccatgccggcgataatggcctgcttctcgccgaaacgtttggtggcgggaccagtgacgaaggcttgagcgagggcgtgcaagattccgaataccgcaagcgacaggccgatcatcgtcgcgctccagcgaaagcggtcctcgccgaaaatgacccagagcgctgccggcacctgtcctacgagttgcatgataaagaagacagtcataagtgcggcgacgatagtcatgccccgcgcccaccggaaggagctgactgggttgaaggctctcaagggcatcggtcgagatcccggtgcctaatgagtgagctaacttacattaattgcgttgcgctcactgcccgctttccagtcgggaaacctgtcgtgccagctgcattaatgaatcggccaacgcgcggggagaggcggtttgcgtattgggcgccagggtggtttttcttttcaccagtgagacgggcaacagctgattgcccttcaccgcctggccctgagagagttgcagcaagcggtccacgctggtttgccccagcaggcgaaaatcctgtttgatggtggttaacggcgggatataacatgagctgtcttcggtatcgtcgtatcccactaccgagatatccgcaccaacgcgcagcccggactcggtaatggcgcgcattgcgcccagcgccatctgatcgttggcaaccagcatcgcagtgggaacgatgccctcattcagcatttgcatggtttgttgaaaaccggacatggcactccagtcgccttcccgttccgctatcggctgaatttgattgcgagtgagatatttatgccagccagccagacgcagacgcgccgagacagaacttaatgggcccgctaacagcgcgatttgctggtgacccaatgcgaccagatgctccacgcccagtcgcgtaccgtcttcatgggagaaaataatactgttgatgggtgtc

SEQ ID NO: 195 - protein, 526 aa, Serratia entomophila; identical to SEQ ID NO: 123

SEQ ID NO: 196 - protein, 1622 aa, Serratia entomophila
MSALRDELKRAPETLASNNIISNFDTRAKIVVEGLASIEIGMNQSVVRLAGHGEAGRKDLDEQVVAWLQRLERIKGELKTDITQATGQSINNFSRQGMLARRMGEWNEAEKQRYLAALSTEDRAVAEMQYNTLFFEVIQHYLPLLSKETDPQGERLLQRLRLEVSNAAEGTTVYPATMAEILAGMKSTEQAIRDWSGRKLLRVVFLAACLEGVKLMPKLAALPLRVAIKFVITGAKVAWATHKGQQGIRGGEGDVDDEIGEYAKRSFKTASVKVVLSLPPGLATMLGVASIALDVYEGGLKGAGGKIAKNIVGDAPWRALNQGSKIAAEAYTTASMNAALKEGGANPVSHSSTLQQQMDAKPFFDNSDQDADQPRVRRKREMTDEIMLSDGSSRSEAKALPDENELDTDQSKSRPESALAVETLQSEHFDFDRGIRYQDFSDEQKKQTYLHGIKFVLLQIENDGHFAQNIRNNAYLARIGAKLAVPVDIYRYKLNNTFLLPDEIDSKSGVLIRLDSEIPYYYVSEGKDLLENIAWAMPYNAANRGPLKFSLDPGEVTSSHSGVDILNNIRSERFKFETYFNYNAPEAMSIESLSAQLANTIEADYKFKNTSPTNKILISRAIVGAHIPDPGVRATQGEYHIEFDSDELAPAKYLRSFARPFSTLSGEMQLISSSIKGETIQETELHVHQAEYIGSWVDATAGAIISFTPEGWFLNTAQSAAEITADLTEGKDPDPLAVAGLLVGIIPGGKIAAKVGKFTRIGGKTVKYGLILGNKSVDLAIVGKSIKTAVDTGEPLAIYQAFLASGMSVKNSYDIAKNMSSELKISKKIEESARLRKLKALQKNTYKYSMNSKMPVRKFRVGQTDLLGKIHKGEIKISRNNGTTWEKGNQLHLLAYRLQNAGGGRLLPDVFRDKIVIGEYSFKRVKYNQKKLNEMMRIAKMYTPTSNSTERIAKLQQNYKTGKEMSHAPQYDTYNDLSLGEKLDLFINSNTDATTRGVLAGKINESITNINLYETAKGVDAWKTSANKATDVVLAPQNIFLKGRAGECLPESILMGWALQSGQDTKLAKKLMNIHSSSNIAANPLYKSLVELHSDGNASRFGESVISDINMKMLSGAESKLFPTENSSVRVDIPEHTMLISKVNKDGKIKYVFYDPNYGMAYFNKYKEMISFFKKKIKGYDTPKRSTSFRQLDYSHLSDIKIKGKNLNEIIDGEIPQIFRQEDVNLEGITPQDGIYRMLGTHQQENNTYIKSQNNIYQVEWDQTTNTWRVFDSANTNRSRITVPIKRDTDGEWFKYTETGLKGGGLFDEIKNNWLQRKRFKNLQDFNDIVDFEENKWPSEPINKDIHMIWVGTRNISEKNIGLSLETARKNSDYNTTIIYDSGIAGYESAKDFMTEKFKDSKVTLVDFRKKSYFHQLQQEPSFPYYEQAIRDKKYAQASDILRLLVLKYEGGIYKDIDDVQVKAFGSLAFPKGIGVMREYAPEAGKTTAFPNTPIAATKNNPVVNKTLELAVENYHRGETNVLKLAGPDVFTESLYQEIPGMRPQVLGAQLDQFELAKRQALGMRLEKPKGFADEKLTLQEKAKIRQPYEAIRGLSGYVDNGADHSWVTDMPGNSTQSSGLS

SEQ ID NO: 197 - DNA, 12151 bp, Serratia entomophila
  primer_bind 5213..5243: note = primer SEAfp18C4_RV
  primer_bind 5223..5272: note = primer YRAfp17_aa1437_OHSEAfp18C4_FW
  primer_bind 7276..7327: note = primer YR_Afp17_p11a_stop_RVpubl
  primer_bind 7305..7332: note = primer pET11a_C3CTS-Stop_lin_FW
  source 1..12151: mol_type = other DNA
  CDS 933..5243: note = SEAfp18-C4 C-terminal truncation I1437
  CDS 5244..7307: note = Yersinia ruckeri Afp17 (1437-2123, amino acids, C4-YR)
tggtcagagacatcaagaaataacgccggaacattagtgcaggcagcttccacagcaatggcatcctggtcatccagcggatagttaatgatcagcccactgacgcgttgcgcgagaagattgtgcaccgccgctttacaggcttcgacgccgcttcgttctaccatcgacaccaccacgctggcacccagttgatcggcgcgagatttaatcgccgcgacaatttgcgacggcgcgtgcagggccagactggaggtggcaacgccaatcagcaacgactgtttgcccgccagttgttgtgccacgcggttgggaatgtaattcagctccgccatcgccgcttccactttttcccgcgttttcgcagaaacgtggctggcctggttcaccacgcgggaaacggtctgataagagacaccggcatactctgcgacatcgtataacgttactggtttcacattcaccaccctgaattgactctcttccgggcgctatcatgccataccgcgaaaggttttgcgccattcgatggtgtccgggatctcgacgctctcccttatgcgactcctgcattaggaagcagcccagtagtaggttgaggccgttgagcaccgccgccgcaaggaatggtgcatgcaaggagatggcgcccaacagtcccccggccacggggcctgccaccatacccacgccgaaacaagcgctcatgagcccgaagtggcgagcccgatcttccccatcggtgatgtcggcgatataggcgccagcaaccgcacctgtggcgccggtgatgccggccacgatgcgtccggcgtagaggatcgagatctcgatcccgcgaaattaatacgactcactataggggaattgtgagcggataacaattcccctctagaaataattttgtttaactttaagaaggagatatacatatgccttactccagtgagtcgaaggaaaaagaaacacactcaaaagaaaccgaaagagataatgctgacccagtatttcaacgggtcagccagggcggcgtgggtgtttcaccgcctgatgaggggggagacttgtcggccggaagtaacaatgaccatttattcgcttttattcgtgaaacacacttggaagaagcccaggaattcaggctaaaagggtataacagccaggtgcccgaggttgacgagggattactgacgcagctgcgtgacgacctggcggcggccaaatcccgccagtacgttcaggcaagcgttggggggccgctgggttctcggtggctgctggaacagataggcaaaatagagcggctgacggacaagttttctgacgaagtaataaaacgctgggttaagcatgagctgccacgaaaaaacgtaggggaagccgcggggaccgagttggggagccggcgtagggctcagtcgctggccagacggttggagtcaaccatgcagacactgatccgcgttgtccataccctgcatgctatggatgactacagtaccccggaaaaacggcacgacatgctggtcgctgagcttaccggcgcgttctcctccagtgataaaaatacggtgatacaggcgctggggagaatgacggcagagacgtcaggtcatgccgcctgggcttcccttatgcaggcccggacagcggcgtgggaggccggtaagtcagccaccgtcgatgcgatgattgcgacttcacagcacgaagcagaaaaagccaataaaaaagcccgtgagcttcagggcgattcacaggctttctttagtcatgtcgccgcctatcttcagagcctctccagcgatttggcaaaagtgtcgattaacatggggcagagcacctcttcctcgactatacggaacgaagcagaaaaagccagtgagcttcagggcgattcacagactttcgttagtcatgtcgccgcctatcttcagagcctccctagcgatttggcaaaagtgccgattaacatgtggcagaatatggattttgttaagacaaaattacaagcgcaaactgcagttgcgggaatgaaagtgcatgcgcaccggcttgtccggatcgcacagcatggtcactccaccaaaacccctgcgaaggatcccgaacaggtcgttaccgattccatcatcagaagcattttatggctgtggcagcagccggccatcaaaatccagtgcgccagcactgcgttgttgtcaaaagtgggtgagctgaaaaaaattgaggggatactggcttcttacgccgtgacggatgagctgggaaacgaacaagaacgccgcaaccctccgggtgaggaggacctggatgcacagctcagggaatgggtgagcgccagccttaagcaggaaaaccccgaaaaccagcgggcggtaaaagtggtgacgctggagcggctgctgggcggtgatatcgccagtgcccgcaacctggtggaacgtctgggaaaagcggaagagggtattcagaatctgctcaggcggcagcaggttgctgtcctgaaaatgtcagttgagcgcttgcctgccgctgtttcctctctgaaggccgtggataaattactgccggatttggcaggtgacctcacggcgagtatcgccgccctgagcaacgcccttcaggcagccgaataccccgcccgcgactttagcgaagcaaaaatacaggccggctatgcacaattgtgggcgacaaaggtgaaggaaagtctgtcggcagcgtctgcacggctgaccgaaagaccgctggatgaacattcacggggcgcacgccttgccaaacattgggcaaacctcgccaaagaacggagcgtgggtaattatccgccgccggatgcacagcaggtacttgcctccctgaaggaacaggggctattagcggggaccctttcaaccggagatccggccgggtatcttttcgccacccggcttgccggtgagcttgaaaatgccggtaatggtgaattgcgattaccgatgagtccggagcaatatgttgctttagagaagggacttgttgagtatattgtaaaatggggacaacggcggatctcacaaggagtcacccgcattgttattgagttgtcctttgagcaggctctggatacggtatcgttcaacgtgtccaagctcttccggttaccttataaggtgctgaaggcctcgataaaaataccgtacaatgtcaataaggttaataattataccatgccgggccatgataagccctataaggcaatttatggcttgctgggaaaaaagcttaagcaacttggctttaatttactgacggcacccgtgcctggcgtgatgaaacttgtggctggcaccgggataaccgcaggtgcaggcgtgcataatttacgtgtcgaaaatagagagaaaacattcagcgcggtttatcaacacgtggtggaaggaaagcaaagtgaaaaaataaaaatggactccgtgaagtcgatgatttttgattcagtgctcgataccgccactacggccgcttttaaagggggacgaagagcctggcaatcaggaagaaataaaaacgacattgaaatcaatgaggtaacactttctcaagcacagcagcgccaagtggcagccaacaatgttgacactgcatgggggaatgctgctgcgaatgagaggaaggttgagccagtgagtcattcatcaccattacagcaacaaaccgatgttaggccgttctctgataagagtgaccaggatgctgctcaacctcgagtacgtaaacgggcagtggcggatatggctccccctccccctcatcaatggcataataacattcctgccaacacgacgctacagtcagaacattttgattttgatcgtgacatacgttatcagggcttctccgatgagaagaaaaaacaaacctatttacatggtattcaacttgtattgcttcagatacaaaatgatggacgctttgcacagaagatcaggaataatgcctaccttgccagtataggcgtttcgaacttagtacctgtcgatatagaaggatataaacttaaaaatacatttcttcttcctgatagcccaagtgctaaatctggagttattgttcgcttagattctgaaaatccttattactatgttggcaaagggagtgatcttttagaagacatcaaatgggccatgcctcatgatgctaatgaacagaagtatgaatatatgcctgattctgatgggaacgctcacttttaccgtctgcgcaacggttttgatatctttaatgatattaggatggggaattcaagtttcgaatatttctttaattataataatccggagccgataagcatcacgagactttcttcatatcttgcaaatactattgagggtgactataaaaacggatcgtcgcccccaaaaaacaaactattaatttccagagcgattactggtgctcatattcctgacccaggggtcactgcaaccgccgctggatatcatatcgaattcacctgggataatttgacttcagcagagtatctgaggtcattttcaaggcccttctctaccctcagtggagaaatgcagttagtgtctagctccattaatggagaaacgatacaggaaacagagctgcatgttcatcaggctgaatatataggaagctgggttgatgctactgtcggggccatcacatctttcacgccggagggatgggttctcaataccacactatcggcagcggacattgctgctgatttgacagaagataaggatcctgacccaatggcggttgctggcctggttgtaggatgcattcctggtggtcggattgcagctaaagtcggaaagttcacccgtattggcggtaaggttgttaaatacgggcttatgcttggcaataaagcggtcgacctggccatcgtagggaagagcgttaagatagctgtagacacgggtgatccactcgcaatttataaggcgcttctgatcagtggcataggtactacgaattcttacgatatggcaaagaatatgtcatcaaagctaaaaatcagcaagaaactggaagacagtgttcaattagataaaccactacaaaatctaaggggaggaagcaagcgtcctgaagagggtgaatcaacctcgcagaagcgttcacagccagatgagagtccagaaaatagtcaggaggctgtatattcaggcccctccggcagagctcgggtgacttttgaccagacgaccgaacatcatataatgcgtatcgctaagatgtataccccaacatcaaatagcacagagagaatagcaaaacttcaacaaaattataagactggaaaggaaatgagtcatgcacctcagtatgacacatataatgatttatctcttggtgaaaaacttgatttatttattaactccaatactgatgcgacaactagaggggttttagcaggaaagataaatgaatccattacgaatatcaatttatatgaaacagctaagggagttgatgcctggaaaacgtcagcaaataaagcaacggatgttgttcttgccccgcaaaatattttcttaaaagggagggctggcgagtgtctgccggagtccatattaatgggttgggctttacagagtgggcaagatacaaaattagcgaaaaaattaatgaatattcattcatcatcgaatattgcagccaatcctttatataaatcactcgttgaattgcattcagatggcaatgcgtctagatttggcgagtcagtgatatctgatattaatatgaaaatgttaagtggtgctgagtcaaaactgttcccaacggaaaactcttccgttagagttgatattcctgaacatactatgttgatatcgaaagtgaataaggatggtaaaataaaatatgtattctatgatcctaattatggcatggcttattttaataaatataaagaaatgatttcgttttttaagaaaaagatcaaggggtatgatactccaaagcgatcgactagtttccgtcagttagattactcacatctttccgatattaaaataaaaggaaaaaacttgaatgaaattatagatggtgaaatcccacaaattttcaggcaagaggatgtgaatttagagggtatcacacctcaagatggtatttataggatgcttggaactcatcaacaagaaaataatacatatataaaatctcaaaataacatttatcaagttgagtgggatcaaacgacgaatacgtggagagtgtttgactctgcaaataccaatcggtccaggataactgtaccaataaaaagagataccgatggggaatggttcaagtatacagagactggtcttaagggcggagggctttttgatgagataaaaaataactggcttcagcgtaaaagatttaaaaatttacaagactttaacgatatcgtagattttgaagaaaataaatggccttctgagccaataaataaagatattcatatgatatgggttggaacacgaaatatatctgagaaaaatattggtttatctctcgaaacagcgcgaaagaactctgattataacacgacaattatttatgacagtgggatcgcagggtatgaaagcgctaaggattttatgactgaaaaatttaaagatagtaaggttacgcttgttgatttcagaaagaaaagctactttcatcaactgcaacaagagccatcttttccttattatgaacaagctattcgagataaaaaatatgcgcaagccagcgatattttaagattattggttttaaaatatgaaggcggtatatataaagatattgatgatgtacaagtgaaggcatttggctctttagcctttccgaaggggattggtgttatgagggagtatgcaccagaggcgggtaaaaccacggcttttcctaatacaccaatagcggcgacaaaaaacaacccagtggttaataaaacattagaacttgctgtagaaaattatcatcgtggagagacaaacgtattgaagttagcagggccagatgtttttactgagtctctatatcaagagataccaggaatgcgtcctcaggttttaggcgcacaattagatcagttcgaattagcaaaacggcaagcgctaggaatgcgtctcgaaaaaccaaaaggctttgcggatgaaaaactgacattgcaagaaaaagcgaaaattagacagccttatgaagcgatacgtggactttctggatatgttgacaatggtgcagatcactcttgggtcactgatatgcccggtaacagcactcaaagctcaggcctgagctaaggtacccttgaggtgctgtttcagggaccaggaggtagtggatctgcttggagccatccacagttcgaaaaaggtggaggttctggcggtggatcaggtggaagtgcatggtctcaccctcagtttgagaaataaggatccggctgctaacaaagcccgaaaggaagctgagttggctgctgccaccgctgagcaataactagcataaccccttggggcctctaaacgggtcttgaggggttttttgctgaaaggaggaactatatccggatatcccgcaagaggcccggcagtaccggcataaccaagcctatgcctacagcatccagggtgacggtgccgaggatgacgatgagcgcattgttagatttcatacacggtgcctgactgcgttagcaatttaactgtgataaactaccgcattaaagcttatcgatgataagctgtcaaacatgagaattcttgaagacgaaagggcctcgtgatacgcctatttttataggttaatgtcatgataataatggtttcttagacgtcaggtggcacttttcggggaaatgtgcgcggaacccctatttgtttatttttctaaatacattcaaatatgtatccgctcatgagacaataaccctgataaatgcttcaataatattgaaaaaggaagagtatgagtattcaacatttccgtgtcgcccttattcccttttttgcggcattttgccttcctgtttttgctcacccagaaacgctggtgaaagtaaaagatgctgaagatcagttgggtgcacgagtgggttacatcgaactggatctcaacagcggtaagatccttgagagttttcgccccgaagaacgttttccaatgatgagcacttttaaagttctgctatgtggcgcggtattatcccgtgttgacgccgggcaagagcaactcggtcgccgcatacactattctcagaatgacttggttgagtactcaccagtcacagaaaagcatcttacggatggcatgacagtaagagaattatgcagtgctgccataaccatgagtgataacactgcggccaacttacttctgacaacgatcggaggaccgaaggagctaaccgcttttttgcacaacatgggggatcatgtaactcgccttgatcgttgggaaccggagctgaatgaagccataccaaacgacgagcgtgacaccacgatgcctgcagcaatggcaacaacgttgcgcaaactattaactggcgaactacttactctagcttcccggcaacaattaatagactggatggaggcggataaagttgcaggaccacttctgcgctcggcccttccggctggctggtttattgctgataaatctggagccggtgagcgtgggtctcgcggtatcattgcagcactggggccagatggtaagccctcccgtatcgtagttatctacacgacggggagtcaggcaactatggatgaacgaaatagacagatcgctgagataggtgcctcactgattaagcattggtaactgtcagaccaagtttactcatatatactttagattgatttaaaacttcatttttaatttaaaaggatctaggtgaagatcctttttgataatctcatgaccaaaatcccttaacgtgagttttcgttccactgagcgtcagaccccgtagaaaagatcaaaggatcttcttgagatcctttttttctgcgcgtaatctgctgcttgcaaacaaaaaaaccaccgctaccagcggtggtttgtttgccggatcaagagctaccaactctttttccgaaggtaactggcttcagcagagcgcagataccaaatactgtccttctagtgtagccgtagttaggccaccacttcaagaactctgtagcaccgcctacatacctcgctctgctaatcctgttaccagtggctgctgccagtggcgataagtcgtgtcttaccgggttggactcaagacgatagttaccggataaggcgcagcggtcgggctgaacggggggttcgtgcacacagcccagcttggagcgaacgacctacaccgaactgagatacctacagcgtgagctatgagaaagcgccacgcttcccgaagggagaaaggcggacaggtatccggtaagcggcagggtcggaacaggagagcgcacgagggagcttccagggggaaacgcctggtatctttatagtcctgtcgggtttcgccacctctgacttgagcgtcgatttttgtgatgctcgtcaggggggcggagcctatggaaaaacgccagcaacgcggcctttttacggttcctggccttttgctggccttttgctcacatgttctttcctgcgttatcccctgattctgtggataaccgtattaccgcctttgagtgagctgataccgctcgccgcagccgaacgaccgagcgcagcgagtcagtgagcgaggaagcggaagagcgcctgatgcggtattttctccttacgcatctgtgcggtatttcacaccgcatatatggtgcactctcagtacaatctgctctgatgccgcatagttaagccagtatacactccgctatcgctacgtgactgggtcatggctgcgccccgacacccgccaacacccgctgacgcgccctgacgggcttgtctgctcccggcatccgcttacagacaagctgtgaccgtctccgggagctgcatgtgtcagaggttttcaccgtcatcaccgaaacgcgcgaggcagctgcggtaaagctcatcagcgtggtcgtgaagcgattcacagatgtctgcctgttcatccgcgtccagctcgttgagtttctccagaagcgttaatgtctggcttctgataaagcgggccatgttaagggcggttttttcctgtttggtcactgatgcctccgtgtaagggggatttctgttcatgggggtaatgataccgatgaaacgagagaggatgctcacgatacgggttactgatgatgaacatgcccggttactggaacgttgtgagggtaaacaactggcggtatggatgcggcgggaccagagaaaaatcactcagggtcaatgccagcgcttcgttaatacagatgtaggtgttccacagggtagccagcagcatcctgcgatgcagatccggaacataatggtgcagggcgctgacttccgcgtttccagactttacgaaacacggaaaccgaagaccattcatgttgttgctcaggtcgcagacgttttgcagcagcagtcgcttcacgttcgctcgcgtatcggtgattcattctgctaaccagtaaggcaaccccgccagcctagccgggtcctcaacgacaggagcacgatcatgcgcacccgtggccaggacccaacgctgcccgagatgcgccgcgtgcggctgctggagatggcggacgcgatggatatgttctgccaagggttggtttgcgcattcacagttctccgcaagaattgattggctccaattcttggagtggtgaatccgttagcgaggtgccgccggcttccattcaggtcgaggtggcccggctccatgcaccgcgacgcaacgcggggaggcagacaaggtatagggcggcgcctacaatccatgccaacccgttccatgtgctcgccgaggcggcataaatcgccgtgacgatcagcggtccagtgatcgaagttaggctggtaagagccgcgagcgatccttgaagctgtccctgatggtcgtcatctacctgcctggacagcatggcctgcaacgcgggcatcccgatgccgccggaagcgagaagaatcataatggggaaggccatccagcctcgcgtcgcgaacgccagcaagacgtagcccagcgcgtcggccgccatgccggcgataatggcctgcttctcgccgaaacgtttggtggcgggaccagtgacgaaggcttgagcgagggcgtgcaagattccgaataccgcaagcgacaggccgatcatcgtcgcgctccagcgaaagcggtcctcgccgaaaatgacccagagcgctgccggcacctgtcctacgagttgcatgataaagaagacagtcataagtgcggcgacgatagtcatgccccgcgcccaccggaaggagctgactgggttgaaggctctcaagggcatcggtcgagatcccggtgcctaatgagtgagctaacttacattaattgcgttgcgctcactgcccgctttccagtcgggaaacctgtcgtgccagctgcattaatgaatcggccaacgcgcggggagaggcggtttgcgtattgggcgccagggtggtttttcttttcaccagtgagacgggcaacagctgattgcccttcaccgcctggccctgagagagttgcagcaagcggtccacgctggtttgccccagcaggcgaaaatcctgtttgatggtggttaacggcgggatataacatgagctgtcttcggtatcgtcgtatcccactaccgagatatccgcaccaacgcgcagcccggactcggtaatggcgcgcattgcgcccagcgccatctgatcgttggcaaccagcatcgcagtgggaacgatgccctcattcagcatttgcatggtttgttgaaaaccggacatggcactccagtcgccttcccgttccgctatcggctgaatttgattgcgagtgagatatttatgccagccagccagacgcagacgcgccgagacagaacttaatgggcccgctaacagcgcgatttgctggtgacccaatgcgaccagatgctccacgcccagtcgcgtaccgtcttcatgggagaaaataatactgttgatgggtgtc

SEQ ID NO: 198 - protein, 1437 aa, Serratia entomophila; identical to SEQ ID NO: 38

SEQ ID NO: 199 - protein, 687 aa, Serratia entomophila
MRIAKMYTPTSNSTERIAKLQQNYKTGKEMSHAPQYDTYNDLSLGEKLDLFINSNTDATTRGVLAGKINESITNINLYETAKGVDAWKTSANKATDVVLAPQNIFLKGRAGECLPESILMGWALQSGQDTKLAKKLMNIHSSSNIAANPLYKSLVELHSDGNASRFGESVISDINMKMLSGAESKLFPTENSSVRVDIPEHTMLISKVNKDGKIKYVFYDPNYGMAYFNKYKEMISFFKKKIKGYDTPKRSTSFRQLDYSHLSDIKIKGKNLNEIIDGEIPQIFRQEDVNLEGITPQDGIYRMLGTHQQENNTYIKSQNNIYQVEWDQTTNTWRVFDSANTNRSRITVPIKRDTDGEWFKYTETGLKGGGLFDEIKNNWLQRKRFKNLQDFNDIVDFEENKWPSEPINKDIHMIWVGTRNISEKNIGLSLETARKNSDYNTTIIYDSGIAGYESAKDFMTEKFKDSKVTLVDFRKKSYFHQLQQEPSFPYYEQAIRDKKYAQASDILRLLVLKYEGGIYKDIDDVQVKAFGSLAFPKGIGVMREYAPEAGKTTAFPNTPIAATKNNPVVNKTLELAVENYHRGETNVLKLAGPDVFTESLYQEIPGMRPQVLGAQLDQFELAKRQALGMRLEKPKGFADEKLTLQEKAKIRQPYEAIRGLSGYVDNGADHSWVTDMPGNSTQSSGLS

SEQ ID NO: 200 - protein, 2366 aa, Serratia entomophila; identical to SEQ ID NO: 19
  BINDING 4..12: note = SE_Afp18-ag1 SSESKEKETHSKET
  REGION 4..12: note = MISC_FEATURE - SE_Afp18-ag1 SSESKEKETHSKET
  BINDING 939..953: note = SE_Afp18-ag2 RVRKRAVADMAPPPP
  REGION 939..953: note = MISC_FEATURE - Afp18-ag2 RVRKRAVADMAPPPP
  BINDING 1463..1476: note = SE_Afp18-ag3 SSKFKSSDEFKVDK
  REGION 1463..1476: note = MISC_FEATURE - SE_Afp18-ag3 SSKFKSSDEFKVDK
  BINDING 1741..1754: note = SE_Afp18-ag4 IIESKNSLDHDTSY
  REGION 1741..1754: note = MISC_FEATURE - SE_Afp18-ag4 IIESKNSLDHDTSY
  BINDING 1921..1936: note = SE_Afp18-ag5 PPTRDSRYFYENER
  REGION 1921..1936: note = MISC_FEATURE - SE_Afp18-ag5 PPTRDSRYFYENER
  BINDING 2306..2318: note = SE_Afp18-ag6 NYKVREKDNLEKK
  REGION 2306..2318: note = MISC_FEATURE - SE_Afp18-ag6 NYKVREKDNLEKK

SEQ ID NO: 201 - protein, 358 aa, Serratia entomophila; identical to SEQ ID NO: 18
  BINDING 104..117: note = SE_Afp17-ag1 DPSFTITKTNQDAG
  REGION 104..117: note = MISC_FEATURE - SE_Afp17-ag1 DPSFTITKTNQDAG
  BINDING 267..280: note = SE_Afp17-ag2 SFSLRERDEHESGY
  REGION 267..280: note = MISC_FEATURE - SE_Afp17-ag2 SFSLRERDEHESGY

SEQ ID NO: 202 - protein, 354 aa, Serratia entomophila; identical to SEQ ID NO: 3
  BINDING 5..18: note = SE_Afp2-ag1 TTYPGVYLSEDAVS
  REGION 5..18: note = MISC_FEATURE - SE_Afp2-ag1 TTYPGVYLSEDAVS

SEQ ID NO: 203 - protein, 451 aa, Serratia entomophila; identical to SEQ ID NO: 4
  BINDING 61..75: note = SE_Afp3-ag1 DSNVPSSARVTVSST
  REGION 61..75: note = MISC_FEATURE - SE_Afp3-ag1 DSNVPSSARVTVSST

SEQ ID NO: 204 - protein, 2123 aa, Yersinia ruckeri; identical to SEQ ID NO: 77
  BINDING 2105..2119: note = YR_Afp17_ag1 DHSWVTDMPGNSTQS
  REGION 2105..2119: note = MISC_FEATURE - YR_Afp17_ag1 DHSWVTDMPGNSTQS

SEQ ID NO: 205 - protein, 20 aa, Serratia entomophila
  PEPTIDE 1..20: note = MPYTHSKETERDSSESKEKE SEAfp18N20backfront randomized version of SEQ. NO. 87, 104
MPYTHSKETERDSSESKEKE

SEQ ID NO: 206 - protein, 20 aa, Serratia entomophila
  PEPTIDE 1..20: note = MPYDRETEKSHTEKEKSESS SEAfp18N20 reverse, randomized version of SEQ. NO. 87, 104
MPYDRETEKSHTEKEKSESS

SEQ ID NO: 207 - protein, 20 aa, Serratia entomophila
  PEPTIDE 1..20: note = MDPRYESTSEEKSSEHETKE SEAfp18N201p1backforth, randomized version of SEQ. NO. 87, 104
MDPRYESTSEEKSSEHETKE

SEQ ID NO: 208 - protein, 20 aa, Serratia entomophila
  PEPTIDE 1..20: note = MRDPYTESSKEESHSKETKE SEAfp18N202p2forthback, randomized version of SEQ. NO. 87, 104
MRDPYTESSKEESHSKETKE

SEQ ID NO: 209 - protein, 16 aa, Serratia entomophila
  PEPTIDE 1..16: note = MPYSSESKEKETHSKE SEAfp18N16, truncated version of SEAfp18NT20 (SEQ. NO.87, 104), SE18N16
MPYSSESKEKETHSKE

SEQ ID NO: 210 - protein, 14 aa, Serratia entomophila
  PEPTIDE 1..14: note = MPYSSESKEKETHS SEAfp18N14, truncated version of SEAfp18NT20 (SEQ. NO.87, 104), SE18N14
MPYSSESKEKETHS

SEQ ID NO: 211 - protein, 12 aa, Serratia entomophila
  PEPTIDE 1..12: note = MPYSSESKEKET SEAfp18N12, truncated version of SEAfp18NT20 (SEQ. NO.87, 104), SE18N12
MPYSSESKEKET

SEQ ID NO: 212 - protein, 9 aa, Serratia entomophila
  PEPTIDE 1..9: note = MPYSSESKE SEAfp18N10, truncated version of SEAfp18NT20 (SEQ. NO.87, 104) and of SEAfp18NT11 (SEQ. NO.90, 107), SE18N10
MPYSSESKE

SEQ ID NO: 213 - protein, 20 aa, Serratia entomophila
  PEPTIDE 1..20: note = MPTKTPQLQLAIEEFNKAIL SEAfp17N20 N-terminal peptide of SEAfp17 SEQ. NO. 18
MPTKTPQLQLAIEEFNKAIL

SEQ ID NO: 214 - protein, 20 aa, Serratia entomophila
  PEPTIDE 1..20: note = MPIEEFNKAILTKTPQLQLA SEAfp17N20backfront randomized sequence of N-terminal 20 amino acids of SEAfp17 SEQ. NO. 18
MPIEEFNKAILTKTPQLQLA

SEQ ID NO: 215 - protein, 20 aa, Serratia entomophila
  PEPTIDE 1..20: note = MPLIAKNFEEIALQLQPTKT SEAfp17N20reverse randomized sequence of N-terminal 20 amino acids of SEAfp17 SEQ. NO. 18
MPLIAKNFEEIALQLQPTKT

SEQ ID NO: 216 - protein, 20 aa, Serratia entomophila
  PEPTIDE 1..20: note = MLPITAKKTNPFQELEQILA SEAfp17N201p1backforth randomized sequence of N-terminal 20 amino acids of SEAfp17 SEQ. NO. 18
MLPITAKKTNPFQELEQILA

SEQ ID NO: 217 - protein, 20 aa, Serratia entomophila
  PEPTIDE 1..20: note = MILPTKAKTFNPQEELQILA SEAfp17N202p2forthback randomized sequence of N-terminal 20 amino acids of SEAfp17 SEQ. NO. 18
MILPTKAKTFNPQEELQILA

SEQ ID NO: 218 - protein, 20 aa, Yersinia ruckeri
  PEPTIDE 1..20: note = MPYFNKSKKNEIRPEKSKEE, YRAfp17N20 N-terminal 20 amino acids of SEQ. NO. 77, gene accession code DJ39_RS03245, WP_004721406
MPYFNKSKKNEIRPEKSKEE

SEQ ID NO: 219 - protein, 20 aa, Serratia fonticola
  PEPTIDE 1..20: note = MPYSRESKEKEIHAKETERD, SFTox20 N-terminal 20 amino acids of PRT of gene with accession code WP_021808094.1, protein with high identity to SEAfp18 (SEQ. NO. 19)
MPYSRESKEKEIHAKETERD

SEQ ID NO: 220 - protein, 20 aa, Erwinia persicina
  PEPTIDE 1..20: note = MPYFNELNEKETRSKETESG, EPTox20 N-terminal 20 amino acids of PRT of gene with accession code WP_137270131.1, protein with high identity to SEAfp18 (SEQ. NO. 19)
MPYFNELNEKETRSKETESG

SEQ ID NO: 221 - protein, 20 aa, Yersinia pekkanenii
  PEPTIDE 1..20: note = MLYSSESKEKKTHSKETERD, YPTox20 N-terminal 20 amino acids of PRT of gene with accession code WP_049612744.1, protein with high identity to SEAfp18 (SEQ. NO. 19)
MLYSSESKEKKTHSKETERD

SEQ ID NO: 222 - protein, 20 aa, Serratia ureilytica
  PEPTIDE 1..20: note = MPYFRESKEKDTHAKESKQD, SUTox20 N-terminal 20 amino acids of PRT of gene with accession code WP_198774613.1, protein with high identity to SEAfp18 (SEQ. NO. 19)
MPYFRESKEKDTHAKESKQD

SEQ ID NO: 223 - protein, 20 aa, Serratia marcescens
  PEPTIDE 1..20: note = MPYSRESKEKDTHAKGSKQD, SMTox20 N-terminal 20 amino acids of PRT of gene with accession code AUO01772.1, protein with high identity to SEAfp18 (SEQ. NO. 19)
MPYSRESKEKDTHAKGSKQD

SEQ ID NO: 224 - protein, 20 aa, Salmonella enterica
  PEPTIDE 1..20: note = MPYSSESKLKDTHLKEAESD, SETox20 N-terminal 20 amino acids of PRT of gene with accession code HAU3143021.1, protein with high identity to SEAfp18 (SEQ. NO. 19)
MPYSSESKLKDTHLKEAESD

SEQ ID NO: 225 - protein, 20 aa, Photorhabdus luminescens
  PEPTIDE 1..20: note = MNISSYFFLNEENIRFNNQC, Photopexin NT20 N-terminal 20 amino acids of PRT of gene PluDJC_08725
MNISSYFFLNEENIRFNNQC

SEQ ID NO: 226 - protein, 20 aa, Photorhabdus luminescens
  PEPTIDE 1..20: note = MPRYSNSQRTPTQSTKNTRR, Toxin CyaA NT20 N-terminal 20 amino acids of PRT of gene PluDJC_08830
MPRYSNSQRTPTQSTKNTRR

SEQ ID NO: 227 - protein, 20 aa, Photorhabdus luminescens
  PEPTIDE 1..20: note = MEHEYSEKEKPQKCPIQLRD, Cysteine protease NT20 N-terminal 20 amino acids of PRT of gene PluDJC_12690
MEHEYSEKEKPQKCPIQLRD

SEQ ID NO: 228 - protein, 19 aa, Photorhabdus asymbiotica
  PEPTIDE 1..19: note = MLKYANPQTVATQRTKNTA, cytotoxic NF 1 NT20 N-terminal 20 amino acids of PRT of gene PAU_RS16555
MLKYANPQTVATQRTKNTA

SEQ ID NO: 229 - protein, 20 aa, Photorhabdus asymbiotica
  PEPTIDE 1..20: note = MEREYNKKEKQKKSAIKLDD, YopT toxin NT20 N-terminal 20 amino acids of PRT of gene PAU_RS10125
MEREYNKKEKQKKSAIKLDD

SEQ ID NO: 230 - protein, 20 aa, Photorhabdus luminescens
  PEPTIDE 1..20: note = MLSTEKHNKDTKHPRNREKK VC2_08635N20 hypothetical protein, NT20 N-terminal 20 amino acids of PRT of gene PluDJC_08635 hypothetical
MLSTEKHNKDTKHPRNREKK

SEQ ID NO: 231 - protein, 20 aa, Photorhabdus luminescens
  PEPTIDE 1..20: note = MPNSKYSEKVNHSANGAEKC, VC3_08730N20 hypothetical protein, NT20 N-terminal 20 amino acids of PRT of gene PluDJC_08730 hypothetical
MPNSKYSEKVNHSANGAEKC

SEQ ID NO: 232 - protein, 20 aa, Photorhabdus luminescens
  PEPTIDE 1..20: note = MYDSKKKNSEPTTKKKFERS, VC6_13210N20 hypothetical protein, NT20 N-terminal 20 amino acids of PRT of gene PluDJC_13210 hypothetical
MYDSKKKNSEPTTKKKFERS

SEQ ID NO: 233 - protein, 20 aa, Photorhabdus asymbiotica
  PEPTIDE 1..20: note = MPNKKYSENTHQGKKPLIKS, PAVC4_1PAU_RS13645 hypothetical, N-terminal 20 amino acids of PRT of gene PAU_RS13645
MPNKKYSENTHQGKKPLIKS

SEQ ID NO: 234 - protein, 20 aa, Photorhabdus asymbiotica
  PEPTIDE 1..20: note = MEREYSEKEKHKKHPIQLRD, PAVC4_2PAU_RS22355 hypothetical protein, N-terminal 20 amino acids of PRT of gene PAU_RS22355
MEREYSEKEKHKKHPIQLRD

SEQ ID NO: 235 - protein, 20 aa, Photorhabdus asymbiotica
  PEPTIDE 1..20: note = MVHEYSINDRQKRHSFSSAN, PAVC4_3PAU_RS13655 hypothetical protein, N-terminal 20 amino acids of PRT of gene PAU_RS13655
MVHEYSINDRQKRHSFSSAN

SEQ ID NO: 236 - protein, 20 aa, Photorhabdus asymbiotica
  PEPTIDE 1..20: note = MISTFDPAICAGTPTVTVLD, PAU_RS10120 RHS repeat protein, N-terminal 20 amino acids of PRT of gene PAU_RS10120
MISTFDPAICAGTPTVTVLD

SEQ ID NO: 237 - protein, 20 aa, Erwinia tasmaniensis
  PEPTIDE 1..20: note = MPYCNASKQKETYLKEIERD, ETTox20 hypothetical protein, N-terminal 20 amino acids of PRT WP_012442690.1 from Erwinia tasmaniensis
MPYCNASKQKETYLKEIERD

SEQ ID NO: 238 - protein, 20 aa, Photorhabdus asymbiotica
  PEPTIDE 1..20: note = MNISSYFFLNEENIKFNNQY, PAVC4_4PAU_RS13660 photopexin, N-terminal 20 amino acids of PRT of gene PAU_RS13660
MNISSYFFLNEENIKFNNQY

SEQ ID NO: 239 - protein, 21 aa, Photorhabdus luminescens
  PEPTIDE 1..21: note = LLTHINLIFRVKCKYSICCLF, VC1_08535N20, NT20 N-terminal 20 amino acids of PRT of gene PluDJC_08535
LLTHINLIFRVKCKYSICCLF

SEQ ID NO: 240 - protein, 20 aa, Photorhabdus luminescens
  PEPTIDE 1..20: note = LCAFPIDGYTNERANQGCGE, VC1_08530N20 hypothetical protein, NT20 N-terminal 20 amino acids of PRT of gene PluDJC_08530
LCAFPIDGYTNERANQGCGE

SEQ ID NO: 241 - protein, 20 aa, Photorhabdus luminescens
  PEPTIDE 1..20: note = IIFTRDRNPTLSAHIKGGKK, VC2_08630N20 hypothetical protein, NT20 N-terminal 20 amino acids of PRT of gene PluDJC_08630
IIFTRDRNPTLSAHIKGGKK

SEQ ID NO: 242 - protein, 20 aa, Photorhabdus luminescens
  PEPTIDE 1..20: note = EVNNGGNKSKAQAHTPDLVM, VC2_08640N20, NT20 N-terminal 20 amino acids of PRT of gene PluDJC_08640
EVNNGGNKSKAQAHTPDLVM

SEQ ID NO: 243 - protein, 20 aa, Photorhabdus luminescens
  PEPTIDE 1..20: note = ELKHDDSKIKSQVSIPNLVK, VC3_08735N20, NT20 N-terminal 20 amino acids of PRT of gene PluDJC_08735
ELKHDDSKIKSQVSIPNLVK

SEQ ID NO: 244 - protein, 20 aa, Photorhabdus luminescens
  PEPTIDE 1..20: note = TIVNPYSIYLKHIPNGFQDA, VC5_12680N20 riboflavin, NT20 N-terminal 20 amino acids of PRT of gene PluDJC_12680
TIVNPYSIYLKHIPNGFQDA

SEQ ID NO: 245 - protein, 20 aa, Photorhabdus luminescens
  PEPTIDE 1..20: note = LGDDIMPISNLAKESEVRAV, VC6_13215N20 hypothetical protein, NT20 N-terminal 20 amino acids of PRT of gene PluDJC_13215
LGDDIMPISNLAKESEVRAV

SEQ ID NO: 246 - protein, 20 aa, Photorhabdus asymbiotica
  PEPTIDE 1..20: note = VGNKNTPSRVKIFISALIFM, PAVC1_4_PAU_RS09730 DUF domain protein, N-terminal 20 amino acids of PRT of gene PAU_RS09730
VGNKNTPSRVKIFISALIFM

SEQ ID NO: 247 - protein, 20 aa, Photorhabdus asymbiotica
  PEPTIDE 1..20: note = MPRYANYQJNPKQNIKNSHG, PAVC5_1PAU_RS16575 hypothetical protein, N-terminal 20 amino acids of PRT of gene PAU_RS16575
MPRYANYQINPKQNIKNSHG

SEQ ID NO: 248 - protein, 19 aa, Photorhabdus asymbiotica
  PEPTIDE 1..19: note = MMFDENLECVNEIINEKLD, PAVC5_2PAU_RS16565 hypothetical protein, N-terminal 20 amino acids of PRT of gene PAU_RS16565
MMFDENLECVNEIINEKLD

SEQ ID NO: 249 - protein, 20 aa, Serratia entomophila
  PEPTIDE 1..20: note = SENKTKHNQQDSTAKDCWHE, RP-1N20 randomized peptide 1, using RandSeq Expasy tool to generate peptides with high polar amino acid content with SEQ. NO. 87, 104 SEAfp18N20 as model in % of polar amino acids
SENKTKHNQQDSTAKDCWHE

SEQ ID NO: 250 - protein, 20 aa, Serratia entomophila
  PEPTIDE 1..20: note = ESHSDDKHRDQETNQKTANK, RP-2N20 randomized peptide 1, using RandSeq Expasy tool to generate peptides with high polar amino acid content with SEQ. NO. 87, 104 SEAfp18N20 as model in % of polar amino acids
ESHSDDKHRDQETNQKTANK

SEQ ID NO: 251 - protein, 20 aa, Serratia entomophila
  PEPTIDE 1..20: note = EDDSKDHFKQSRNQTEKHYN, RP-3N20 randomized peptide 1, using RandSeq Expasy tool to generate peptides with high polar amino acid content with SEQ. NO. 87, 104 SEAfp18N20 as model in % of polar amino acids
EDDSKDHFKQSRNQTEKHYN

SEQ ID NO: 252 - protein, 20 aa, Serratia entomophila
  PEPTIDE 1..20: note = EDHVNKKKQHTTSSDQDINE, RP-4N20 randomized peptide 1, using RandSeq Expasy tool to generate peptides with high polar amino acid content with SEQ. NO. 87, 104 SEAfp18N20 as model in % of polar amino acids
EDHVNKKKQHTTSSDQDINE

SEQ ID NO: 253 - protein, 20 aa, Serratia entomophila
  PEPTIDE 1..20: note = MEHEYSEKEKPQGKKPLIKS, RP-5N20 randomized peptide 1, using RandSeq Expasy tool to generate peptides with high polar amino acid content with SEQ. NO. 87, 104 SEAfp18N20 as model in % of polar amino acids
MEHEYSEKEKPQGKKPLIKS

SEQ ID NO: 254 - DNA, 8110 bp, Yersinia ruckeri
  source 1..8110: mol_type = other DNA; note = 25_yrnt20-casphi2-pet11a_U9784IC070-25
  CDS 933..992: note = YRAfp17NT20; protein_id = 255; translation = MPYFNKSKKNEIRPEKSKEE
  CDS 993..3263: note = Casphi2; protein_id = 256; translation = MPKPAVESEFSKVLKKHFPGERFRSSYMKRGGKILAAQGEEAVVAY LQGKSEEEPPNFQPPAKCHVVTKSRDFAEWPIMKASEAIQRYIYALSTTERAACKPGKS SESHAAWFAATGVSNHGYSHVQGLNLIFDHTLGRYDGVLKKVQLRNEKARARLESINAS RADEGLPEIKAEEEEVATNETGHLLQPPGINPSFYVYQTISPQAYRPRDEIVLPPEYAG YVRDPNAPIPLGVVRNRCDIQKGCPGYIPEWQREAGTAISPKTGKAVTVPGLSPKKNKR MRRYWRSEKEKAQDALLVTVRIGTDWVVIDVRGLLRNARWRTIAPKDISLNALLDLFTG DPVIDVRRNIVTFTYTLDACGTYARKWTLKGKQTKATLDKLTATQTVALVAIDLGQTNP ISAGISRVTQENGALQCEPLDRFTLPDDLLKDISAYRIAWDRNEEELRARSVEALPEAQ QAEVRALDGVSKETARTQLCADFGLDPKRLPWDKMSSNTTFISEALLSNSVSRDQVFFT PAPKKGAKKKAPVEVMRKDRTWARAYKPRLSVEAQKLKNEALWALKRTSPEYLKLSRRK EELCRRSINYVIEKTRRRTQCQIVIPVIEDLNVRFFHGSGKRLPGWDNFFTAKKENRWF IQGLHKAFSDLRTHRSFYVFEVRPERTSITCPKCGHCEVGNRDGEAFQCLSCGKTCNAD LDVATHNLTQVALTGKTMPKREEPRDAQGTAPARKTKKASKSKAPPAEREDQTPAQEPS QTS
tggtcagagacatcaagaaataacgccggaacattagtgcaggcagcttccacagcaatggcatcctggtcatccagcggatagttaatgatcagcccactgacgcgttgcgcgagaagattgtgcaccgccgctttacaggcttcgacgccgcttcgttctaccatcgacaccaccacgctggcacccagttgatcggcgcgagatttaatcgccgcgacaatttgcgacggcgcgtgcagggccagactggaggtggcaacgccaatcagcaacgactgtttgcccgccagttgttgtgccacgcggttgggaatgtaattcagctccgccatcgccgcttccactttttcccgcgttttcgcagaaacgtggctggcctggttcaccacgcgggaaacggtctgataagagacaccggcatactctgcgacatcgtataacgttactggtttcacattcaccaccctgaattgactctcttccgggcgctatcatgccataccgcgaaaggttttgcgccattcgatggtgtccgggatctcgacgctctcccttatgcgactcctgcattaggaagcagcccagtagtaggttgaggccgttgagcaccgccgccgcaaggaatggtgcatgcaaggagatggcgcccaacagtcccccggccacggggcctgccaccatacccacgccgaaacaagcgctcatgagcccgaagtggcgagcccgatcttccccatcggtgatgtcggcgatataggcgccagcaaccgcacctgtggcgccggtgatgccggccacgatgcgtccggcgtagaggatcgagatctcgatcccgcgaaattaatacgactcactataggggaattgtgagcggataacaattcccctctagaaataattttgtttaactttaagaaggagatatacatatgccttactttaataaatcgaagaaaaatgaaataaggccagaaaaaagtaaggaagaaatgccgaaaccggcggtggagagcgagttcagcaaggttctgaagaaacacttcccgggcgagcgttttcgtagcagctacatgaaacgtggtggcaagatcctggcggcgcaaggcgaggaagcggtggttgcgtatctgcagggcaaaagcgaggaagagccgccgaacttccaaccgccggcgaaatgccacgtggttaccaagagccgtgactttgcggagtggccgattatgaaggcgagcgaagcgatccagcgttacatttatgcgctgagcaccaccgagcgtgcggcgtgcaaaccgggcaagagcagcgaaagccatgcggcgtggtttgcggcgaccggcgtgagcaaccacggctacagccacgttcaaggcctgaacctgatctttgaccacaccctgggtcgttatgatggcgtgctgaagaaagttcagctgcgtaacgagaaagcgcgtgcgcgtctggaaagcatcaacgcgagccgtgcggatgagggtctgccggaaattaaggcggaagaggaagaggtggcgaccaacgaaaccggccacctgctgcagccgccgggtatcaacccgagcttttacgtttatcaaaccattagcccgcaggcgtaccgtccgcgtgacgagattgtgctgccgccggaatacgcgggttatgttcgtgatccgaacgcgccgattccgctgggcgtggttcgtaaccgttgcgacatccaaaaaggttgcccgggctacattccggagtggcagcgtgaagcgggtaccgcgatcagcccgaaaaccggcaaggcggtgaccgttccgggtctgagcccgaagaaaaacaagcgtatgcgtcgttattggcgtagcgagaaagaaaaggcgcaagatgcgctgctggtgaccgttcgtatcggtaccgactgggtggttattgatgttcgtggcctgctgcgtaacgcgcgttggcgtaccatcgcgccgaaagacattagcctgaacgcgctgctggacctgttcaccggcgacccggtgatcgatgttcgtcgtaacattgttacctttacctacaccctggacgcgtgcggtacctatgcgcgtaagtggaccctgaaaggcaagcagaccaaagcgaccctggacaagctgaccgcgacccaaaccgtggcgctggttgcgatcgatctgggtcagaccaacccgatcagcgcgggcattagccgtgtgacccaagagaacggtgcgctgcagtgcgaaccgctggaccgtttcaccctgccggacgatctgctgaaagacatcagcgcgtaccgtattgcgtgggatcgtaacgaagaggaactgcgtgcgcgtagcgttgaggcgctgccggaagcgcagcaagcggaagtgcgtgcgctggatggtgttagcaaggaaaccgcgcgtacccaactgtgcgcggacttcggtctggacccgaaacgtctgccgtgggacaagatgagcagcaacaccacctttatcagcgaggcgctgctgagcaacagcgtgagccgtgatcaggttttctttaccccggcgccgaagaaaggtgcgaagaaaaaggcgccggtggaagttatgcgtaaagaccgtacctgggcgcgtgcgtataagccgcgtctgagcgtggaggcgcagaaactgaagaacgaagcgctgtgggcgctgaaacgtaccagcccggagtacctgaaactgagccgtcgtaaagaggagctgtgccgtcgtagcatcaactatgtgattgagaagacccgtcgtcgtacccagtgccaaatcgtgattccggttattgaagacctgaacgttcgtttctttcacggtagcggcaaacgtctgccgggttgggataacttctttaccgcgaaaaaggaaaaccgttggttcatccaaggcctgcacaaggcgtttagcgacctgcgtacccaccgtagcttctacgtgtttgaggttcgtccggaacgtaccagcattacctgcccgaaatgcggtcactgcgaggttggtaaccgtgatggcgaagcgttccagtgcctgagctgcggcaagacctgcaacgcggacctggatgtggcgacccacaacctgacccaagttgcgctgaccggcaaaaccatgccgaagcgtgaggaaccgcgtgacgcgcagggtaccgcgccggcgcgtaaaaccaaaaaggcgagcaaaagcaaggctccgccggcggagcgtgaagatcaaaccccggcgcaagagccgagccagaccagctaaggtacccttgaggtgctgtttcagggaccaggaggtagtggatctgcttggagccatccacagttcgaaaaaggtggaggttctggcggtggatcaggtggaagtgcatggtctcaccctcagtttgagaaataaggatccggctgctaacaaagcccgaaaggaagctgagttggctgctgccaccgctgagcaataactagcataaccccttggggcctctaaacgggtcttgaggggttttttgctgaaaggaggaactatatccggatatcccgcaagaggcccggcagtaccggcataaccaagcctatgcctacagcatccagggtgacggtgccgaggatgacgatgagcgcattgttagatttcatacacggtgcctgactgcgttagcaatttaactgtgataaactaccgcattaaagcttatcgatgataagctgtcaaacatgagaattcttgaagacgaaagggcctcgtgatacgcctatttttataggttaatgtcatgataataatggtttcttagacgtcaggtggcacttttcggggaaatgtgcgcggaacccctatttgtttatttttctaaatacattcaaatatgtatccgctcatgagacaataaccctgataaatgcttcaataatattgaaaaaggaagagtatgagtattcaacatttccgtgtcgcccttattcccttttttgcggcattttgccttcctgtttttgctcacccagaaacgctggtgaaagtaaaagatgctgaagatcagttgggtgcacgagtgggttacatcgaactggatctcaacagcggtaagatccttgagagttttcgccccgaagaacgttttccaatgatgagcacttttaaagttctgctatgtggcgcggtattatcccgtgttgacgccgggcaagagcaactcggtcgccgcatacactattctcagaatgacttggttgagtactcaccagtcacagaaaagcatcttacggatggcatgacagtaagagaattatgcagtgctgccataaccatgagtgataacactgcggccaacttacttctgacaacgatcggaggaccgaaggagctaaccgcttttttgcacaacatgggggatcatgtaactcgccttgatcgttgggaaccggagctgaatgaagccataccaaacgacgagcgtgacaccacgatgcctgcagcaatggcaacaacgttgcgcaaactattaactggcgaactacttactctagcttcccggcaacaattaatagactggatggaggcggataaagttgcaggaccacttctgcgctcggcccttccggctggctggtttattgctgataaatctggagccggtgagcgtgggtctcgcggtatcattgcagcactggggccagatggtaagccctcccgtatcgtagttatctacacgacggggagtcaggcaactatggatgaacgaaatagacagatcgctgagataggtgcctcactgattaagcattggtaactgtcagaccaagtttactcatatatactttagattgatttaaaacttcatttttaatttaaaaggatctaggtgaagatcctttttgataatctcatgaccaaaatcccttaacgtgagttttcgttccactgagcgtcagaccccgtagaaaagatcaaaggatcttcttgagatcctttttttctgcgcgtaatctgctgcttgcaaacaaaaaaaccaccgctaccagcggtggtttgtttgccggatcaagagctaccaactctttttccgaaggtaactggcttcagcagagcgcagataccaaatactgtccttctagtgtagccgtagttaggccaccacttcaagaactctgtagcaccgcctacatacctcgctctgctaatcctgttaccagtggctgctgccagtggcgataagtcgtgtcttaccgggttggactcaagacgatagttaccggataaggcgcagcggtcgggctgaacggggggttcgtgcacacagcccagcttggagcgaacgacctacaccgaactgagatacctacagcgtgagctatgagaaagcgccacgcttcccgaagggagaaaggcggacaggtatccggtaagcggcagggtcggaacaggagagcgcacgagggagcttccagggggaaacgcctggtatctttatagtcctgtcgggtttcgccacctctgacttgagcgtcgatttttgtgatgctcgtcaggggggcggagcctatggaaaaacgccagcaacgcggcctttttacggttcctggccttttgctggccttttgctcacatgttctttcctgcgttatcccctgattctgtggataaccgtattaccgcctttgagtgagctgataccgctcgccgcagccgaacgaccgagcgcagcgagtcagtgagcgaggaagcggaagagcgcctgatgcggtattttctccttacgcatctgtgcggtatttcacaccgcatatatggtgcactctcagtacaatctgctctgatgccgcatagttaagccagtatacactccgctatcgctacgtgactgggtcatggctgcgccccgacacccgccaacacccgctgacgcgccctgacgggcttgtctgctcccggcatccgcttacagacaagctgtgaccgtctccgggagctgcatgtgtcagaggttttcaccgtcatcaccgaaacgcgcgaggcagctgcggtaaagctcatcagcgtggtcgtgaagcgattcacagatgtctgcctgttcatccgcgtccagctcgttgagtttctccagaagcgttaatgtctggcttctgataaagcgggccatgttaagggcggttttttcctgtttggtcactgatgcctccgtgtaagggggatttctgttcatgggggtaatgataccgatgaaacgagagaggatgctcacgatacgggttactgatgatgaacatgcccggttactggaacgttgtgagggtaaacaactggcggtatggatgcggcgggaccagagaaaaatcactcagggtcaatgccagcgcttcgttaatacagatgtaggtgttccacagggtagccagcagcatcctgcgatgcagatccggaacataatggtgcagggcgctgacttccgcgtttccagactttacgaaacacggaaaccgaagaccattcatgttgttgctcaggtcgcagacgttttgcagcagcagtcgcttcacgttcgctcgcgtatcggtgattcattctgctaaccagtaaggcaaccccgccagcctagccgggtcctcaacgacaggagcacgatcatgcgcacccgtggccaggacccaacgctgcccgagatgcgccgcgtgcggctgctggagatggcggacgcgatggatatgttctgccaagggttggtttgcgcattcacagttctccgcaagaattgattggctccaattcttggagtggtgaatccgttagcgaggtgccgccggcttccattcaggtcgaggtggcccggctccatgcaccgcgacgcaacgcggggaggcagacaaggtatagggcggcgcctacaatccatgccaacccgttccatgtgctcgccgaggcggcataaatcgccgtgacgatcagcggtccagtgatcgaagttaggctggtaagagccgcgagcgatccttgaagctgtccctgatggtcgtcatctacctgcctggacagcatggcctgcaacgcgggcatcccgatgccgccggaagcgagaagaatcataatggggaaggccatccagcctcgcgtcgcgaacgccagcaagacgtagcccagcgcgtcggccgccatgccggcgataatggcctgcttctcgccgaaacgtttggtggcgggaccagtgacgaaggcttgagcgagggcgtgcaagattccgaataccgcaagcgacaggccgatcatcgtcgcgctccagcgaaagcggtcctcgccgaaaatgacccagagcgctgccggcacctgtcctacgagttgcatgataaagaagacagtcataagtgcggcgacgatagtcatgccccgcgcccaccggaaggagctgactgggttgaaggctctcaagggcatcggtcgagatcccggtgcctaatgagtgagctaacttacattaattgcgttgcgctcactgcccgctttccagtcgggaaacctgtcgtgccagctgcattaatgaatcggccaacgcgcggggagaggcggtttgcgtattgggcgccagggtggtttttcttttcaccagtgagacgggcaacagctgattgcccttcaccgcctggccctgagagagttgcagcaagcggtccacgctggtttgccccagcaggcgaaaatcctgtttgatggtggttaacggcgggatataacatgagctgtcttcggtatcgtcgtatcccactaccgagatatccgcaccaacgcgcagcccggactcggtaatggcgcgcattgcgcccagcgccatctgatcgttggcaaccagcatcgcagtgggaacgatgccctcattcagcatttgcatggtttgttgaaaaccggacatggcactccagtcgccttcccgttccgctatcggctgaatttgattgcgagtgagatatttatgccagccagccagacgcagacgcgccgagacagaacttaatgggcccgctaacagcgcgatttgctggtgacccaatgcgaccagatgctccacgcccagtcgcgtaccgtcttcatgggagaaaataatactgttgatgggtgtc

SEQ ID NO: 255 - protein, 20 aa, Yersinia ruckeri
MPYFNKSKKNEIRPEKSKEE

SEQ ID NO: 256 - protein, 757 aa, Yersinia ruckeri; identical to SEQ ID NO: 99

SEQ ID NO: 257 - DNA, 8110 bp, Salmonella enterica
  source 1..8110: mol_type = other DNA; note = 31_setox20-casphi2-pet11a_U9784IC070-31
  CDS 933..992: note = SETox20; protein_id = 258; translation = MPYSSESKLKDTHLKEAESD
  CDS 993..3263: note = Casphi2; protein_id = 259; translation = MPKPAVESEFSKVLKKHFPGERFRSSYMKRGGKILAAQGEEAVVAY LQGKSEEEPPNFQPPAKCHVVTKSRDFAEWPIMKASEAIQRYIYALSTTERAACKPGKS SESHAAWFAATGVSNHGYSHVQGLNLIFDHTLGRYDGVLKKVQLRNEKARARLESINAS RADEGLPEIKAEEEEVATNETGHLLQPPGINPSFYVYQTISPQAYRPRDEIVLPPEYAG YVRDPNAPIPLGVVRNRCDIQKGCPGYIPEWQREAGTAISPKTGKAVTVPGLSPKKNKR MRRYWRSEKEKAQDALLVTVRIGTDWVVIDVRGLLRNARWRTIAPKDISLNALLDLFTG DPVIDVRRNIVTFTYTLDACGTYARKWTLKGKQTKATLDKLTATQTVALVAIDLGQTNP ISAGISRVTQENGALQCEPLDRFTLPDDLLKDISAYRIAWDRNEEELRARSVEALPEAQ QAEVRALDGVSKETARTQLCADFGLDPKRLPWDKMSSNTTFISEALLSNSVSRDQVFFT PAPKKGAKKKAPVEVMRKDRTWARAYKPRLSVEAQKLKNEALWALKRTSPEYLKLSRRK EELCRRSINYVIEKTRRRTQCQIVIPVIEDLNVRFFHGSGKRLPGWDNFFTAKKENRWF IQGLHKAFSDLRTHRSFYVFEVRPERTSITCPKCGHCEVGNRDGEAFQCLSCGKTCNAD LDVATHNLTQVALTGKTMPKREEPRDAQGTAPARKTKKASKSKAPPAEREDQTPAQEPS QTS
tggtcagagacatcaagaaataacgccggaacattagtgcaggcagcttccacagcaatggcatcctggtcatccagcggatagttaatgatcagcccactgacgcgttgcgcgagaagattgtgcaccgccgctttacaggcttcgacgccgcttcgttctaccatcgacaccaccacgctggcacccagttgatcggcgcgagatttaatcgccgcgacaatttgcgacggcgcgtgcagggccagactggaggtggcaacgccaatcagcaacgactgtttgcccgccagttgttgtgccacgcggttgggaatgtaattcagctccgccatcgccgcttccactttttcccgcgttttcgcagaaacgtggctggcctggttcaccacgcgggaaacggtctgataagagacaccggcatactctgcgacatcgtataacgttactggtttcacattcaccaccctgaattgactctcttccgggcgctatcatgccataccgcgaaaggttttgcgccattcgatggtgtccgggatctcgacgctctcccttatgcgactcctgcattaggaagcagcccagtagtaggttgaggccgttgagcaccgccgccgcaaggaatggtgcatgcaaggagatggcgcccaacagtcccccggccacggggcctgccaccatacccacgccgaaacaagcgctcatgagcccgaagtggcgagcccgatcttccccatcggtgatgtcggcgatataggcgccagcaaccgcacctgtggcgccggtgatgccggccacgatgcgtccggcgtagaggatcgagatctcgatcccgcgaaattaatacgactcactataggggaattgtgagcggataacaattcccctctagaaataattttgtttaactttaagaaggagatatacatatgccgtatagcagcgaaagcaaactgaaagatacccatctgaaagaagcggaaagcgatatgccgaaaccggcggtggagagcgagttcagcaaggttctgaagaaacacttcccgggcgagcgttttcgtagcagctacatgaaacgtggtggcaagatcctggcggcgcaaggcgaggaagcggtggttgcgtatctgcagggcaaaagcgaggaagagccgccgaacttccaaccgccggcgaaatgccacgtggttaccaagagccgtgactttgcggagtggccgattatgaaggcgagcgaagcgatccagcgttacatttatgcgctgagcaccaccgagcgtgcggcgtgcaaaccgggcaagagcagcgaaagccatgcggcgtggtttgcggcgaccggcgtgagcaaccacggctacagccacgttcaaggcctgaacctgatctttgaccacaccctgggtcgttatgatggcgtgctgaagaaagttcagctgcgtaacgagaaagcgcgtgcgcgtctggaaagcatcaacgcgagccgtgcggatgagggtctgccggaaattaaggcggaagaggaagaggtggcgaccaacgaaaccggccacctgctgcagccgccgggtatcaacccgagcttttacgtttatcaaaccattagcccgcaggcgtaccgtccgcgtgacgagattgtgctgccgccggaatacgcgggttatgttcgtgatccgaacgcgccgattccgctgggcgtggttcgtaaccgttgcgacatccaaaaaggttgcccgggctacattccggagtggcagcgtgaagcgggtaccgcgatcagcccgaaaaccggcaaggcggtgaccgttccgggtctgagcccgaagaaaaacaagcgtatgcgtcgttattggcgtagcgagaaagaaaaggcgcaagatgcgctgctggtgaccgttcgtatcggtaccgactgggtggttattgatgttcgtggcctgctgcgtaacgcgcgttggcgtaccatcgcgccgaaagacattagcctgaacgcgctgctggacctgttcaccggcgacccggtgatcgatgttcgtcgtaacattgttacctttacctacaccctggacgcgtgcggtacctatgcgcgtaagtggaccctgaaaggcaagcagaccaaagcgaccctggacaagctgaccgcgacccaaaccgtggcgctggttgcgatcgatctgggtcagaccaacccgatcagcgcgggcattagccgtgtgacccaagagaacggtgcgctgcagtgcgaaccgctggaccgtttcaccctgccggacgatctgctgaaagacatcagcgcgtaccgtattgcgtgggatcgtaacgaagaggaactgcgtgcgcgtagcgttgaggcgctgccggaagcgcagcaagcggaagtgcgtgcgctggatggtgttagcaaggaaaccgcgcgtacccaactgtgcgcggacttcggtctggacccgaaacgtctgccgtgggacaagatgagcagcaacaccacctttatcagcgaggcgctgctgagcaacagcgtgagccgtgatcaggttttctttaccccggcgccgaagaaaggtgcgaagaaaaaggcgccggtggaagttatgcgtaaagaccgtacctgggcgcgtgcgtataagccgcgtctgagcgtggaggcgcagaaactgaagaacgaagcgctgtgggcgctgaaacgtaccagcccggagtacctgaaactgagccgtcgtaaagaggagctgtgccgtcgtagcatcaactatgtgattgagaagacccgtcgtcgtacccagtgccaaatcgtgattccggttattgaagacctgaacgttcgtttctttcacggtagcggcaaacgtctgccgggttgggataacttctttaccgcgaaaaaggaaaaccgttggttcatccaaggcctgcacaaggcgtttagcgacctgcgtacccaccgtagcttctacgtgtttgaggttcgtccggaacgtaccagcattacctgcccgaaatgcggtcactgcgaggttggtaaccgtgatggcgaagcgttccagtgcctgagctgcggcaagacctgcaacgcggacctggatgtggcgacccacaacctgacccaagttgcgctgaccggcaaaaccatgccgaagcgtgaggaaccgcgtgacgcgcagggtaccgcgccggcgcgtaaaaccaaaaaggcgagcaaaagcaaggctccgccggcggagcgtgaagatcaaaccccggcgcaagagccgagccagaccagctaaggtacccttgaggtgctgtttcagggaccaggaggtagtggatctgcttggagccatccacagttcgaaaaaggtggaggttctggcggtggatcaggtggaagtgcatggtctcaccctcagtttgagaaataaggatccggctgctaacaaagcccgaaaggaagctgagttggctgctgccaccgctgagcaataactagcataaccccttggggcctctaaacgggtcttgaggggttttttgctgaaaggaggaactatatccggatatcccgcaagaggcccggcagtaccggcataaccaagcctatgcctacagcatccagggtgacggtgccgaggatgacgatgagcgcattgttagatttcatacacggtgcctgactgcgttagcaatttaactgtgataaactaccgcattaaagcttatcgatgataagctgtcaaacatgagaattcttgaagacgaaagggcctcgtgatacgcctatttttataggttaatgtcatgataataatggtttcttagacgtcaggtggcacttttcggggaaatgtgcgcggaacccctatttgtttatttttctaaatacattcaaatatgtatccgctcatgagacaataaccctgataaatgcttcaataatattgaaaaaggaagagtatgagtattcaacatttccgtgtcgcccttattcccttttttgcggcattttgccttcctgtttttgctcacccagaaacgctggtgaaagtaaaagatgctgaagatcagttgggtgcacgagtgggttacatcgaactggatctcaacagcggtaagatccttgagagttttcgccccgaagaacgttttccaatgatgagcacttttaaagttctgctatgtggcgcggtattatcccgtgttgacgccgggcaagagcaactcggtcgccgcatacactattctcagaatgacttggttgagtactcaccagtcacagaaaagcatcttacggatggcatgacagtaagagaattatgcagtgctgccataaccatgagtgataacactgcggccaacttacttctgacaacgatcggaggaccgaaggagctaaccgcttttttgcacaacatgggggatcatgtaactcgccttgatcgttgggaaccggagctgaatgaagccataccaaacgacgagcgtgacaccacgatgcctgcagcaatggcaacaacgttgcgcaaactattaactggcgaactacttactctagcttcccggcaacaattaatagactggatggaggcggataaagttgcaggaccacttctgcgctcggcccttccggctggctggtttattgctgataaatctggagccggtgagcgtgggtctcgcggtatcattgcagcactggggccagatggtaagccctcccgtatcgtagttatctacacgacggggagtcaggcaactatggatgaacgaaatagacagatcgctgagataggtgcctcactgattaagcattggtaactgtcagaccaagtttactcatatatactttagattgatttaaaacttcatttttaatttaaaaggatctaggtgaagatcctttttgataatctcatgaccaaaatcccttaacgtgagttttcgttccactgagcgtcagaccccgtagaaaagatcaaaggatcttcttgagatcctttttttctgcgcgtaatctgctgcttgcaaacaaaaaaaccaccgctaccagcggtggtttgtttgccggatcaagagctaccaactctttttccgaaggtaactggcttcagcagagcgcagataccaaatactgtccttctagtgtagccgtagttaggccaccacttcaagaactctgtagcaccgcctacatacctcgctctgctaatcctgttaccagtggctgctgccagtggcgataagtcgtgtcttaccgggttggactcaagacgatagttaccggataaggcgcagcggtcgggctgaacggggggttcgtgcacacagcccagcttggagcgaacgacctacaccgaactgagatacctacagcgtgagctatgagaaagcgccacgcttcccgaagggagaaaggcggacaggtatccggtaagcggcagggtcggaacaggagagcgcacgagggagcttccagggggaaacgcctggtatctttatagtcctgtcgggtttcgccacctctgacttgagcgtcgatttttgtgatgctcgtcaggggggcggagcctatggaaaaacgccagcaacgcggcctttttacggttcctggccttttgctggccttttgctcacatgttctttcctgcgttatcccctgattctgtggataaccgtattaccgcctttgagtgagctgataccgctcgccgcagccgaacgaccgagcgcagcgagtcagtgagcgaggaagcggaagagcgcctgatgcggtattttctccttacgcatctgtgcggtatttcacaccgcatatatggtgcactctcagtacaatctgctctgatgccgcatagttaagccagtatacactccgctatcgctacgtgactgggtcatggctgcgccccgacacccgccaacacccgctgacgcgccctgacgggcttgtctgctcccggcatccgcttacagacaagctgtgaccgtctccgggagctgcatgtgtcagaggttttcaccgtcatcaccgaaacgcgcgaggcagctgcggtaaagctcatcagcgtggtcgtgaagcgattcacagatgtctgcctgttcatccgcgtccagctcgttgagtttctccagaagcgttaatgtctggcttctgataaagcgggccatgttaagggcggttttttcctgtttggtcactgatgcctccgtgtaagggggatttctgttcatgggggtaatgataccgatgaaacgagagaggatgctcacgatacgggttactgatgatgaacatgcccggttactggaacgttgtgagggtaaacaactggcggtatggatgcggcgggaccagagaaaaatcactcagggtcaatgccagcgcttcgttaatacagatgtaggtgttccacagggtagccagcagcatcctgcgatgcagatccggaacataatggtgcagggcgctgacttccgcgtttccagactttacgaaacacggaaaccgaagaccattcatgttgttgctcaggtcgcagacgttttgcagcagcagtcgcttcacgttcgctcgcgtatcggtgattcattctgctaaccagtaaggcaaccccgccagcctagccgggtcctcaacgacaggagcacgatcatgcgcacccgtggccaggacccaacgctgcccgagatgcgccgcgtgcggctgctggagatggcggacgcgatggatatgttctgccaagggttggtttgcgcattcacagttctccgcaagaattgattggctccaattcttggagtggtgaatccgttagcgaggtgccgccggcttccattcaggtcgaggtggcccggctccatgcaccgcgacgcaacgcggggaggcagacaaggtatagggcggcgcctacaatccatgccaacccgttccatgtgctcgccgaggcggcataaatcgccgtgacgatcagcggtccagtgatcgaagttaggctggtaagagccgcgagcgatccttgaagctgtccctgatggtcgtcatctacctgcctggacagcatggcctgcaacgcgggcatcccgatgccgccggaagcgagaagaatcataatggggaaggccatccagcctcgcgtcgcgaacgccagcaagacgtagcccagcgcgtcggccgccatgccggcgataatggcctgcttctcgccgaaacgtttggtggcgggaccagtgacgaaggcttgagcgagggcgtgcaagattccgaataccgcaagcgacaggccgatcatcgtcgcgctccagcgaaagcggtcctcgccgaaaatgacccagagcgctgccggcacctgtcctacgagttgcatgataaagaagacagtcataagtgcggcgacgatagtcatgccccgcgcccaccggaaggagctgactgggttgaaggctctcaagggcatcggtcgagatcccggtgcctaatgagtgagctaacttacattaattgcgttgcgctcactgcccgctttccagtcgggaaacctgtcgtgccagctgcattaatgaatcggccaacgcgcggggagaggcggtttgcgtattgggcgccagggtggtttttcttttcaccagtgagacgggcaacagctgattgcccttcaccgcctggccctgagagagttgcagcaagcggtccacgctggtttgccccagcaggcgaaaatcctgtttgatggtggttaacggcgggatataacatgagctgtcttcggtatcgtcgtatcccactaccgagatatccgcaccaacgcgcagcccggactcggtaatggcgcgcattgcgcccagcgccatctgatcgttggcaaccagcatcgcagtgggaacgatgccctcattcagcatttgcatggtttgttgaaaaccggacatggcactccagtcgccttcccgttccgctatcggctgaatttgattgcgagtgagatatttatgccagccagccagacgcagacgcgccgagacagaacttaatgggcccgctaacagcgcgatttgctggtgacccaatgcgaccagatgctccacgcccagtcgcgtaccgtcttcatgggagaaaataatactgttgatgggtgtc

SEQ ID NO: 258 - protein, 20 aa, Salmonella enterica
MPYSSESKLKDTHLKEAESD

SEQ ID NO: 259 - protein, 757 aa, Salmonella enterica; identical to SEQ ID NO: 99

SEQ ID NO: 260 - DNA, 8110 bp, Yersinia pekkanenii
  source 1..8110: mol_type = other DNA; note = 1YPTox20 Yersinia pekkanenii, signal domain
  CDS 933..992: note = YPTox20; protein_id = 261; translation = MLYSSESKEKKTHSKETERD
  CDS 993..3263: note = Casphi2; protein_id = 262; translation = MPKPAVESEFSKVLKKHFPGERFRSSYMKRGGKILAAQGEEAVVAY LQGKSEEEPPNFQPPAKCHVVTKSRDFAEWPIMKASEAIQRYIYALSTTERAACKPGKS SESHAAWFAATGVSNHGYSHVQGLNLIFDHTLGRYDGVLKKVQLRNEKARARLESINAS RADEGLPEIKAEEEEVATNETGHLLQPPGINPSFYVYQTISPQAYRPRDEIVLPPEYAG YVRDPNAPIPLGVVRNRCDIQKGCPGYIPEWQREAGTAISPKTGKAVTVPGLSPKKNKR MRRYWRSEKEKAQDALLVTVRIGTDWVVIDVRGLLRNARWRTIAPKDISLNALLDLFTG DPVIDVRRNIVTFTYTLDACGTYARKWTLKGKQTKATLDKLTATQTVALVAIDLGQTNP ISAGISRVTQENGALQCEPLDRFTLPDDLLKDISAYRIAWDRNEEELRARSVEALPEAQ QAEVRALDGVSKETARTQLCADFGLDPKRLPWDKMSSNTTFISEALLSNSVSRDQVFFT PAPKKGAKKKAPVEVMRKDRTWARAYKPRLSVEAQKLKNEALWALKRTSPEYLKLSRRK EELCRRSINYVIEKTRRRTQCQIVIPVIEDLNVRFFHGSGKRLPGWDNFFTAKKENRWF IQGLHKAFSDLRTHRSFYVFEVRPERTSITCPKCGHCEVGNRDGEAFQCLSCGKTCNAD LDVATHNLTQVALTGKTMPKREEPRDAQGTAPARKTKKASKSKAPPAEREDQTPAQEPS QTS
tggtcagagacatcaagaaataacgccggaacattagtgcaggcagcttccacagcaatggcatcctggtcatccagcggatagttaatgatcagcccactgacgcgttgcgcgagaagattgtgcaccgccgctttacaggcttcgacgccgcttcgttctaccatcgacaccaccacgctggcacccagttgatcggcgcgagatttaatcgccgcgacaatttgcgacggcgcgtgcagggccagactggaggtggcaacgccaatcagcaacgactgtttgcccgccagttgttgtgccacgcggttgggaatgtaattcagctccgccatcgccgcttccactttttcccgcgttttcgcagaaacgtggctggcctggttcaccacgcgggaaacggtctgataagagacaccggcatactctgcgacatcgtataacgttactggtttcacattcaccaccctgaattgactctcttccgggcgctatcatgccataccgcgaaaggttttgcgccattcgatggtgtccgggatctcgacgctctcccttatgcgactcctgcattaggaagcagcccagtagtaggttgaggccgttgagcaccgccgccgcaaggaatggtgcatgcaaggagatggcgcccaacagtcccccggccacggggcctgccaccatacccacgccgaaacaagcgctcatgagcccgaagtggcgagcccgatcttccccatcggtgatgtcggcgatataggcgccagcaaccgcacctgtggcgccggtgatgccggccacgatgcgtccggcgtagaggatcgagatctcgatcccgcgaaattaatacgactcactataggggaattgtgagcggataacaattcccctctagaaataattttgtttaactttaagaaggagatatacatatgctgtatagcagcgaaagcaaagaaaaaaaaacccatagcaaagaaaccgaacgcgatatgccgaaaccggcggtggagagcgagttcagcaaggttctgaagaaacacttcccgggcgagcgttttcgtagcagctacatgaaacgtggtggcaagatcctggcggcgcaaggcgaggaagcggtggttgcgtatctgcagggcaaaagcgaggaagagccgccgaacttccaaccgccggcgaaatgccacgtggttaccaagagccgtgactttgcggagtggccgattatgaaggcgagcgaagcgatccagcgttacatttatgcgctgagcaccaccgagcgtgcggcgtgcaaaccgggcaagagcagcgaaagccatgcggcgtggtttgcggcgaccggcgtgagcaaccacggctacagccacgttcaaggcctgaacctgatctttgaccacaccctgggtcgttatgatggcgtgctgaagaaagttcagctgcgtaacgagaaagcgcgtgcgcgtctggaaagcatcaacgcgagccgtgcggatgagggtctgccggaaattaaggcggaagaggaagaggtggcgaccaacgaaaccggccacctgctgcagccgccgggtatcaacccgagcttttacgtttatcaaaccattagcccgcaggcgtaccgtccgcgtgacgagattgtgctgccgccggaatacgcgggttatgttcgtgatccgaacgcgccgattccgctgggcgtggttcgtaaccgttgcgacatccaaaaaggttgcccgggctacattccggagtggcagcgtgaagcgggtaccgcgatcagcccgaaaaccggcaaggcggtgaccgttccgggtctgagcccgaagaaaaacaagcgtatgcgtcgttattggcgtagcgagaaagaaaaggcgcaagatgcgctgctggtgaccgttcgtatcggtaccgactgggtggttattgatgttcgtggcctgctgcgtaacgcgcgttggcgtaccatcgcgccgaaagacattagcctgaacgcgctgctggacctgttcaccggcgacccggtgatcgatgttcgtcgtaacattgttacctttacctacaccctggacgcgtgcggtacctatgcgcgtaagtggaccctgaaaggcaagcagaccaaagcgaccctggacaagctgaccgcgacccaaaccgtggcgctggttgcgatcgatctgggtcagaccaacccgatcagcgcgggcattagccgtgtgacccaagagaacggtgcgctgcagtgcgaaccgctggaccgtttcaccctgccggacgatctgctgaaagacatcagcgcgtaccgtattgcgtgggatcgtaacgaagaggaactgcgtgcgcgtagcgttgaggcgctgccggaagcgcagcaagcggaagtgcgtgcgctggatggtgttagcaaggaaaccgcgcgtacccaactgtgcgcggacttcggtctggacccgaaacgtctgccgtgggacaagatgagcagcaacaccacctttatcagcgaggcgctgctgagcaacagcgtgagccgtgatcaggttttctttaccccggcgccgaagaaaggtgcgaagaaaaaggcgccggtggaagttatgcgtaaagaccgtacctgggcgcgtgcgtataagccgcgtctgagcgtggaggcgcagaaactgaagaacgaagcgctgtgggcgctgaaacgtaccagcccggagtacctgaaactgagccgtcgtaaagaggagctgtgccgtcgtagcatcaactatgtgattgagaagacccgtcgtcgtacccagtgccaaatcgtgattccggttattgaagacctgaacgttcgtttctttcacggtagcggcaaacgtctgccgggttgggataacttctttaccgcgaaaaaggaaaaccgttggttcatccaaggcctgcacaaggcgtttagcgacctgcgtacccaccgtagcttctacgtgtttgaggttcgtccggaacgtaccagcattacctgcccgaaatgcggtcactgcgaggttggtaaccgtgatggcgaagcgttccagtgcctgagctgcggcaagacctgcaacgcggacctggatgtggcgacccacaacctgacccaagttgcgctgaccggcaaaaccatgccgaagcgtgaggaaccgcgtgacgcgcagggtaccgcgccggcgcgtaaaaccaaaaaggcgagcaaaagcaaggctccgccggcggagcgtgaagatcaaaccccggcgcaagagccgagccagaccagctaaggtacccttgaggtgctgtttcagggaccaggaggtagtggatctgcttggagccatccacagttcgaaaaaggtggaggttctggcggtggatcaggtggaagtgcatggtctcaccctcagtttgagaaataaggatccggctgctaacaaagcccgaaaggaagctgagttggctgctgccaccgctgagcaataactagcataaccccttggggcctctaaacgggtcttgaggggttttttgctgaaaggaggaactatatccggatatcccgcaagaggcccggcagtaccggcataaccaagcctatgcctacagcatccagggtgacggtgccgaggatgacgatgagcgcattgttagatttcatacacggtgcctgactgcgttagcaatttaactgtgataaactaccgcattaaagcttatcgatgataagctgtcaaacatgagaattcttgaagacgaaagggcctcgtgatacgcctatttttataggttaatgtcatgataataatggtttcttagacgtcaggtggcacttttcggggaaatgtgcgcggaacccctatttgtttatttttctaaatacattcaaatatgtatccgctcatgagacaataaccctgataaatgcttcaataatattgaaaaaggaagagtatgagtattcaacatttccgtgtcgcccttattcccttttttgcggcattttgccttcctgtttttgctcacccagaaacgctggtgaaagtaaaagatgctgaagatcagttgggtgcacgagtgggttacatcgaactggatctcaacagcggtaagatccttgagagttttcgccccgaagaacgttttccaatgatgagcacttttaaagttctgctatgtggcgcggtattatcccgtgttgacgccgggcaagagcaactcggtcgccgcatacactattctcagaatgacttggttgagtactcaccagtcacagaaaagcatcttacggatggcatgacagtaagagaattatgcagtgctgccataaccatgagtgataacactgcggccaacttacttctgacaacgatcggaggaccgaaggagctaaccgcttttttgcacaacatgggggatcatgtaactcgccttgatcgttgggaaccggagctgaatgaagccataccaaacgacgagcgtgacaccacgatgcctgcagcaatggcaacaacgttgcgcaaactattaactggcgaactacttactctagcttcccggcaacaattaatagactggatggaggcggataaagttgcaggaccacttctgcgctcggcccttccggctggctggtttattgctgataaatctggagccggtgagcgtgggtctcgcggtatcattgcagcactggggccagatggtaagccctcccgtatcgtagttatctacacgacggggagtcaggcaactatggatgaacgaaatagacagatcgctgagataggtgcctcactgattaagcattggtaactgtcagaccaagtttactcatatatactttagattgatttaaaacttcatttttaatttaaaaggatctaggtgaagatcctttttgataatctcatgaccaaaatcccttaacgtgagttttcgttccactgagcgtcagaccccgtagaaaagatcaaaggatcttcttgagatcctttttttctgcgcgtaatctgctgcttgcaaacaaaaaaaccaccgctaccagcggtggtttgtttgccggatcaagagctaccaactctttttccgaaggtaactggcttcagcagagcgcagataccaaatactgtccttctagtgtagccgtagttaggccaccacttcaagaactctgtagcaccgcctacatacctcgctctgctaatcctgttaccagtggctgctgccagtggcgataagtcgtgtcttaccgggttggactcaagacgatagttaccggataaggcgcagcggtcgggctgaacggggggttcgtgcacacagcccagcttggagcgaacgacctacaccgaactgagatacctacagcgtgagctatgagaaagcgccacgcttcccgaagggagaaaggcggacaggtatccggtaagcggcagggtcggaacaggagagcgcacgagggagcttccagggggaaacgcctggtatctttatagtcctgtcgggtttcgccacctctgacttgagcgtcgatttttgtgatgctcgtcaggggggcggagcctatggaaaaacgccagcaacgcggcctttttacggttcctggccttttgctggccttttgctcacatgttctttcctgcgttatcccctgattctgtggataaccgtattaccgcctttgagtgagctgataccgctcgccgcagccgaacgaccgagcgcagcgagtcagtgagcgaggaagcggaagagcgcctgatgcggtattttctccttacgcatctgtgcggtatttcacaccgcatatatggtgcactctcagtacaatctgctctgatgccgcatagttaagccagtatacactccgctatcgctacgtgactgggtcatggctgcgccccgacacccgccaacacccgctgacgcgccctgacgggcttgtctgctcccggcatccgcttacagacaagctgtgaccgtctccgggagctgcatgtgtcagaggttttcaccgtcatcaccgaaacgcgcgaggcagctgcggtaaagctcatcagcgtggtcgtgaagcgattcacagatgtctgcctgttcatccgcgtccagctcgttgagtttctccagaagcgttaatgtctggcttctgataaagcgggccatgttaagggcggttttttcctgtttggtcactgatgcctccgtgtaagggggatttctgttcatgggggtaatgataccgatgaaacgagagaggatgctcacgatacgggttactgatgatgaacatgcccggttactggaacgttgtgagggtaaacaactggcggtatggatgcggcgggaccagagaaaaatcactcagggtcaatgccagcgcttcgttaatacagatgtaggtgttccacagggtagccagcagcatcctgcgatgcagatccggaacataatggtgcagggcgctgacttccgcgtttccagactttacgaaacacggaaaccgaagaccattcatgttgttgctcaggtcgcagacgttttgcagcagcagtcgcttcacgttcgctcgcgtatcggtgattcattctgctaaccagtaaggcaaccccgccagcctagccgggtcctcaacgacaggagcacgatcatgcgcacccgtggccaggacccaacgctgcccgagatgcgccgcgtgcggctgctggagatggcggacgcgatggatatgttctgccaagggttggtttgcgcattcacagttctccgcaagaattgattggctccaattcttggagtggtgaatccgttagcgaggtgccgccggcttccattcaggtcgaggtggcccggctccatgcaccgcgacgcaacgcggggaggcagacaaggtatagggcggcgcctacaatccatgccaacccgttccatgtgctcgccgaggcggcataaatcgccgtgacgatcagcggtccagtgatcgaagttaggctggtaagagccgcgagcgatccttgaagctgtccctgatggtcgtcatctacctgcctggacagcatggcctgcaacgcgggcatcccgatgccgccggaagcgagaagaatcataatggggaaggccatccagcctcgcgtcgcgaacgccagcaagacgtagcccagcgcgtcggccgccatgccggcgataatggcctgcttctcgccgaaacgtttggtggcgggaccagtgacgaaggcttgagcgagggcgtgcaagattccgaataccgcaagcgacaggccgatcatcgtcgcgctccagcgaaagcggtcctcgccgaaaatgacccagagcgctgccggcacctgtcctacgagttgcatgataaagaagacagtcataagtgcggcgacgatagtcatgccccgcgcccaccggaaggagctgactgggttgaaggctctcaagggcatcggtcgagatcccggtgcctaatgagtgagctaacttacattaattgcgttgcgctcactgcccgctttccagtcgggaaacctgtcgtgccagctgcattaatgaatcggccaacgcgcggggagaggcggtttgcgtattgggcgccagggtggtttttcttttcaccagtgagacgggcaacagctgattgcccttcaccgcctggccctgagagagttgcagcaagcggtccacgctggtttgccccagcaggcgaaaatcctgtttgatggtggttaacggcgggatataacatgagctgtcttcggtatcgtcgtatcccactaccgagatatccgcaccaacgcgcagcccggactcggtaatggcgcgcattgcgcccagcgccatctgatcgttggcaaccagcatcgcagtgggaacgatgccctcattcagcatttgcatggtttgttgaaaaccggacatggcactccagtcgccttcccgttccgctatcggctgaatttgattgcgagtgagatatttatgccagccagccagacgcagacgcgccgagacagaacttaatgggcccgctaacagcgcgatttgctggtgacccaatgcgaccagatgctccacgcccagtcgcgtaccgtcttcatgggagaaaataatactgttgatgggtgtc

SEQ ID NO: 261 - protein, 20 aa, Yersinia pekkanenii
MLYSSESKEKKTHSKETERD

SEQ ID NO: 262 - protein, 757 aa, Yersinia pekkanenii; identical to SEQ ID NO: 99

SEQ ID NO: 263 - DNA, 8110 bp, Photorhabdus luminescens
  source 1..8110: mol_type = other DNA; note = 12_plcyaant20-casphi2-pet11a_U9784IC070-12
  CDS 933..992: note = CyaANT20; protein_id = 264; translation = MPRYSNSQRTPTQSTKNTRR
  CDS 993..3263: note = Casphi2; protein_id = 265; translation = MPKPAVESEFSKVLKKHFPGERFRSSYMKRGGKILAAQGEEAVVAY LQGKSEEEPPNFQPPAKCHVVTKSRDFAEWPIMKASEAIQRYIYALSTTERAACKPGKS SESHAAWFAATGVSNHGYSHVQGLNLIFDHTLGRYDGVLKKVQLRNEKARARLESINAS RADEGLPEIKAEEEEVATNETGHLLQPPGINPSFYVYQTISPQAYRPRDEIVLPPEYAG YVRDPNAPIPLGVVRNRCDIQKGCPGYIPEWQREAGTAISPKTGKAVTVPGLSPKKNKR MRRYWRSEKEKAQDALLVTVRIGTDWVVIDVRGLLRNARWRTIAPKDISLNALLDLFTG DPVIDVRRNIVTFTYTLDACGTYARKWTLKGKQTKATLDKLTATQTVALVAIDLGQTNP ISAGISRVTQENGALQCEPLDRFTLPDDLLKDISAYRIAWDRNEEELRARSVEALPEAQ QAEVRALDGVSKETARTQLCADFGLDPKRLPWDKMSSNTTFISEALLSNSVSRDQVFFT PAPKKGAKKKAPVEVMRKDRTWARAYKPRLSVEAQKLKNEALWALKRTSPEYLKLSRRK EELCRRSINYVIEKTRRRTQCQIVIPVIEDLNVRFFHGSGKRLPGWDNFFTAKKENRWF IQGLHKAFSDLRTHRSFYVFEVRPERTSITCPKCGHCEVGNRDGEAFQCLSCGKTCNAD LDVATHNLTQVALTGKTMPKREEPRDAQGTAPARKTKKASKSKAPPAEREDQTPAQEPS QTS
tggtcagagacatcaagaaataacgccggaacattagtgcaggcagcttccacagcaatggcatcctggtcatccagcggatagttaatgatcagcccactgacgcgttgcgcgagaagattgtgcaccgccgctttacaggcttcgacgccgcttcgttctaccatcgacaccaccacgctggcacccagttgatcggcgcgagatttaatcgccgcgacaatttgcgacggcgcgtgcagggccagactggaggtggcaacgccaatcagcaacgactgtttgcccgccagttgttgtgccacgcggttgggaatgtaattcagctccgccatcgccgcttccactttttcccgcgttttcgcagaaacgtggctggcctggttcaccacgcgggaaacggtctgataagagacaccggcatactctgcgacatcgtataacgttactggtttcacattcaccaccctgaattgactctcttccgggcgctatcatgccataccgcgaaaggttttgcgccattcgatggtgtccgggatctcgacgctctcccttatgcgactcctgcattaggaagcagcccagtagtaggttgaggccgttgagcaccgccgccgcaaggaatggtgcatgcaaggagatggcgcccaacagtcccccggccacggggcctgccaccatacccacgccgaaacaagcgctcatgagcccgaagtggcgagcccgatcttccccatcggtgatgtcggcgatataggcgccagcaaccgcacctgtggcgccggtgatgccggccacgatgcgtccggcgtagaggatcgagatctcgatcccgcgaaattaatacgactcactataggggaattgtgagcggataacaattcccctctagaaataattttgtttaactttaagaaggagatatacatatgccaagatattctaattctcagagaacccctacacaaagtactaaaaatacccgtagaatgccgaaaccggcggtggagagcgagttcagcaaggttctgaagaaacacttcccgggcgagcgttttcgtagcagctacatgaaacgtggtggcaagatcctggcggcgcaaggcgaggaagcggtggttgcgtatctgcagggcaaaagcgaggaagagccgccgaacttccaaccgccggcgaaatgccacgtggttaccaagagccgtgactttgcggagtggccgattatgaaggcgagcgaagcgatccagcgttacatttatgcgctgagcaccaccgagcgtgcggcgtgcaaaccgggcaagagcagcgaaagccatgcggcgtggtttgcggcgaccggcgtgagcaaccacggctacagccacgttcaaggcctgaacctgatctttgaccacaccctgggtcgttatgatggcgtgctgaagaaagttcagctgcgtaacgagaaagcgcgtgcgcgtctggaaagcatcaacgcgagccgtgcggatgagggtctgccggaaattaaggcggaagaggaagaggtggcgaccaacgaaaccggccacctgctgcagccgccgggtatcaacccgagcttttacgtttatcaaaccattagcccgcaggcgtaccgtccgcgtgacgagattgtgctgccgccggaatacgcgggttatgttcgtgatccgaacgcgccgattccgctgggcgtggttcgtaaccgttgcgacatccaaaaaggttgcccgggctacattccggagtggcagcgtgaagcgggtaccgcgatcagcccgaaaaccggcaaggcggtgaccgttccgggtctgagcccgaagaaaaacaagcgtatgcgtcgttattggcgtagcgagaaagaaaaggcgcaagatgcgctgctggtgaccgttcgtatcggtaccgactgggtggttattgatgttcgtggcctgctgcgtaacgcgcgttggcgtaccatcgcgccgaaagacattagcctgaacgcgctgctggacctgttcaccggcgacccggtgatcgatgttcgtcgtaacattgttacctttacctacaccctggacgcgtgcggtacctatgcgcgtaagtggaccctgaaaggcaagcagaccaaagcgaccctggacaagctgaccgcgacccaaaccgtggcgctggttgcgatcgatctgggtcagaccaacccgatcagcgcgggcattagccgtgtgacccaagagaacggtgcgctgcagtgcgaaccgctggaccgtttcaccctgccggacgatctgctgaaagacatcagcgcgtaccgtattgcgtgggatcgtaacgaagaggaactgcgtgcgcgtagcgttgaggcgctgccggaagcgcagcaagcggaagtgcgtgcgctggatggtgttagcaaggaaaccgcgcgtacccaactgtgcgcggacttcggtctggacccgaaacgtctgccgtgggacaagatgagcagcaacaccacctttatcagcgaggcgctgctgagcaacagcgtgagccgtgatcaggttttctttaccccggcgccgaagaaaggtgcgaagaaaaaggcgccggtggaagttatgcgtaaagaccgtacctgggcgcgtgcgtataagccgcgtctgagcgtggaggcgcagaaactgaagaacgaagcgctgtgggcgctgaaacgtaccagcccggagtacctgaaactgagccgtcgtaaagaggagctgtgccgtcgtagcatcaactatgtgattgagaagacccgtcgtcgtacccagtgccaaatcgtgattccggttattgaagacctgaacgttcgtttctttcacggtagcggcaaacgtctgccgggttgggataacttctttaccgcgaaaaaggaaaaccgttggttcatccaaggcctgcacaaggcgtttagcgacctgcgtacccaccgtagcttctacgtgtttgaggttcgtccggaacgtaccagcattacctgcccgaaatgcggtcactgcgaggttggtaaccgtgatggcgaagcgttccagtgcctgagctgcggcaagacctgcaacgcggacctggatgtggcgacccacaacctgacccaagttgcgctgaccggcaaaaccatgccgaagcgtgaggaaccgcgtgacgcgcagggtaccgcgccggcgcgtaaaaccaaaaaggcgagcaaaagcaaggctccgccggcggagcgtgaagatcaaaccccggcgcaagagccgagccagaccagctaaggtacccttgaggtgctgtttcagggaccaggaggtagtggatctgcttggagccatccacagttcgaaaaaggtggaggttctggcggtggatcaggtggaagtgcatggtctcaccctcagtttgagaaataaggatccggctgctaacaaagcccgaaaggaagctgagttggctgctgccaccgctgagcaataactagcataaccccttggggcctctaaacgggtcttgaggggttttttgctgaaaggaggaactatatccggatatcccgcaagaggcccggcagtaccggcataaccaagcctatgcctacagcatccagggtgacggtgccgaggatgacgatgagcgcattgttagatttcatacacggtgcctgactgcgttagcaatttaactgtgataaactaccgcattaaagcttatcgatgataagctgtcaaacatgagaattcttgaagacgaaagggcctcgtgatacgcctatttttataggttaatgtcatgataataatggtttcttagacgtcaggtggcacttttcggggaaatgtgcgcggaacccctatttgtttatttttctaaatacattcaaatatgtatccgctcatgagacaataaccctgataaatgcttcaataatattgaaaaaggaagagtatgagtattcaacatttccgtgtcgcccttattcccttttttgcggcattttgccttcctgtttttgctcacccagaaacgctggtgaaagtaaaagatgctgaagatcagttgggtgcacgagtgggttacatcgaactggatctcaacagcggtaagatccttgagagttttcgccccgaagaacgttttccaatgatgagcacttttaaagttctgctatgtggcgcggtattatcccgtgttgacgccgggcaagagcaactcggtcgccgcatacactattctcagaatgacttggttgagtactcaccagtcacagaaaagcatcttacggatggcatgacagtaagagaattatgcagtgctgccataaccatgagtgataacactgcggccaacttacttctgacaacgatcggaggaccgaaggagctaaccgcttttttgcacaacatgggggatcatgtaactcgccttgatcgttgggaaccggagctgaatgaagccataccaaacgacgagcgtgacaccacgatgcctgcagcaatggcaacaacgttgcgcaaactattaactggcgaactacttactctagcttcccggcaacaattaatagactggatggaggcggataaagttgcaggaccacttctgcgctcggcccttccggctggctggtttattgctgataaatctggagccggtgagcgtgggtctcgcggtatcattgcagcactggggccagatggtaagccctcccgtatcgtagttatctacacgacggggagtcaggcaactatggatgaacgaaatagacagatcgctgagataggtgcctcactgattaagcattggtaactgtcagaccaagtttactcatatatactttagattgatttaaaacttcatttttaatttaaaaggatctaggtgaagatcctttttgataatctcatgaccaaaatcccttaacgtgagttttcgttccactgagcgtcagaccccgtagaaaagatcaaaggatcttcttgagatcctttttttctgcgcgtaatctgctgcttgcaaacaaaaaaaccaccgctaccagcggtggtttgtttgccggatcaagagctaccaactctttttccgaaggtaactggcttcagcagagcgcagataccaaatactgtccttctagtgtagccgtagttaggccaccacttcaagaactctgtagcaccgcctacatacctcgctctgctaatcctgttaccagtggctgctgccagtggcgataagtcgtgtcttaccgggttggactcaagacgatagttaccggataaggcgcagcggtcgggctgaacggggggttcgtgcacacagcccagcttggagcgaacgacctacaccgaactgagatacctacagcgtgagctatgagaaagcgccacgcttcccgaagggagaaaggcggacaggtatccggtaagcggcagggtcggaacaggagagcgcacgagggagcttccagggggaaacgcctggtatctttatagtcctgtcgggtttcgccacctctgacttgagcgtcgatttttgtgatgctcgtcaggggggcggagcctatggaaaaacgccagcaacgcggcctttttacggttcctggccttttgctggccttttgctcacatgttctttcctgcgttatcccctgattctgtggataaccgtattaccgcctttgagtgagctgataccgctcgccgcagccgaacgaccgagcgcagcgagtcagtgagcgaggaagcggaagagcgcctgatgcggtattttctccttacgcatctgtgcggtatttcacaccgcatatatggtgcactctcagtacaatctgctctgatgccgcatagttaagccagtatacactccgctatcgctacgtgactgggtcatggctgcgccccgacacccgccaacacccgctgacgcgccctgacgggcttgtctgctcccggcatccgcttacagacaagctgtgaccgtctccgggagctgcatgtgtcagaggttttcaccgtcatcaccgaaacgcgcgaggcagctgcggtaaagctcatcagcgtggtcgtgaagcgattcacagatgtctgcctgttcatccgcgtccagctcgttgagtttctccagaagcgttaatgtctggcttctgataaagcgggccatgttaagggcggttttttcctgtttggtcactgatgcctccgtgtaagggggatttctgttcatgggggtaatgataccgatgaaacgagagaggatgctcacgatacgggttactgatgatgaacatgcccggttactggaacgttgtgagggtaaacaactggcggtatggatgcggcgggaccagagaaaaatcactcagggtcaatgccagcgcttcgttaatacagatgtaggtgttccacagggtagccagcagcatcctgcgatgcagatccggaacataatggtgcagggcgctgacttccgcgtttccagactttacgaaacacggaaaccgaagaccattcatgttgttgctcaggtcgcagacgttttgcagcagcagtcgcttcacgttcgctcgcgtatcggtgattcattctgctaaccagtaaggcaaccccgccagcctagccgggtcctcaacgacaggagcacgatcatgcgcacccgtggccaggacccaacgctgcccgagatgcgccgcgtgcggctgctggagatggcggacgcgatggatatgttctgccaagggttggtttgcgcattcacagttctccgcaagaattgattggctccaattcttggagtggtgaatccgttagcgaggtgccgccggcttccattcaggtcgaggtggcccggctccatgcaccgcgacgcaacgcggggaggcagacaaggtatagggcggcgcctacaatccatgccaacccgttccatgtgctcgccgaggcggcataaatcgccgtgacgatcagcggtccagtgatcgaagttaggctggtaagagccgcgagcgatccttgaagctgtccctgatggtcgtcatctacctgcctggacagcatggcctgcaacgcgggcatcccgatgccgccggaagcgagaagaatcataatggggaaggccatccagcctcgcgtcgcgaacgccagcaagacgtagcccagcgcgtcggccgccatgccggcgataatggcctgcttctcgccgaaacgtttggtggcgggaccagtgacgaaggcttgagcgagggcgtgcaagattccgaataccgcaagcgacaggccgatcatcgtcgcgctccagcgaaagcggtcctcgccgaaaatgacccagagcgctgccggcacctgtcctacgagttgcatgataaagaagacagtcataagtgcggcgacgatagtcatgccccgcgcccaccggaaggagctgactgggttgaaggctctcaagggcatcggtcgagatcccggtgcctaatgagtgagctaacttacattaattgcgttgcgctcactgcccgctttccagtcgggaaacctgtcgtgccagctgcattaatgaatcggccaacgcgcggggagaggcggtttgcgtattgggcgccagggtggtttttcttttcaccagtgagacgggcaacagctgattgcccttcaccgcctggccctgagagagttgcagcaagcggtccacgctggtttgccccagcaggcgaaaatcctgtttgatggtggttaacggcgggatataacatgagctgtcttcggtatcgtcgtatcccactaccgagatatccgcaccaacgcgcagcccggactcggtaatggcgcgcattgcgcccagcgccatctgatcgttggcaaccagcatcgcagtgggaacgatgccctcattcagcatttgcatggtttgttgaaaaccggacatggcactccagtcgccttcccgttccgctatcggctgaatttgattgcgagtgagatatttatgccagccagccagacgcagacgcgccgagacagaacttaatgggcccgctaacagcgcgatttgctggtgacccaatgcgaccagatgctccacgcccagtcgcgtaccgtcttcatgggagaaaataatactgttgatgggtgtc

SEQ ID NO: 264 - protein, 20 aa, Photorhabdus luminescens
MPRYSNSQRTPTQSTKNTRR

SEQ ID NO: 265 - protein, 757 aa, Photorhabdus luminescens; identical to SEQ ID NO: 99

SEQ ID NO: 266 - DNA, 8110 bp, Erwinia persicina
  source 1..8110: mol_type = other DNA; note = 2_eptox20-casphi2-pet11a_U9784IC070-2
  CDS 933..992: note = EPTox20; protein_id = 267; translation = MPYFNELNEKETRSKETESG
  CDS 993..3263: note = Casphi2; protein_id = 268; translation = MPKPAVESEFSKVLKKHFPGERFRSSYMKRGGKILAAQGEEAVVAY LQGKSEEEPPNFQPPAKCHVVTKSRDFAEWPIMKASEAIQRYIYALSTTERAACKPGKS SESHAAWFAATGVSNHGYSHVQGLNLIFDHTLGRYDGVLKKVQLRNEKARARLESINAS RADEGLPEIKAEEEEVATNETGHLLQPPGINPSFYVYQTISPQAYRPRDEIVLPPEYAG YVRDPNAPIPLGVVRNRCDIQKGCPGYIPEWQREAGTAISPKTGKAVTVPGLSPKKNKR MRRYWRSEKEKAQDALLVTVRIGTDWVVIDVRGLLRNARWRTIAPKDISLNALLDLFTG DPVIDVRRNIVTFTYTLDACGTYARKWTLKGKQTKATLDKLTATQTVALVAIDLGQTNP ISAGISRVTQENGALQCEPLDRFTLPDDLLKDISAYRIAWDRNEEELRARSVEALPEAQ QAEVRALDGVSKETARTQLCADFGLDPKRLPWDKMSSNTTFISEALLSNSVSRDQVFFT PAPKKGAKKKAPVEVMRKDRTWARAYKPRLSVEAQKLKNEALWALKRTSPEYLKLSRRK EELCRRSINYVIEKTRRRTQCQIVIPVIEDLNVRFFHGSGKRLPGWDNFFTAKKENRWF IQGLHKAFSDLRTHRSFYVFEVRPERTSITCPKCGHCEVGNRDGEAFQCLSCGKTCNAD LDVATHNLTQVALTGKTMPKREEPRDAQGTAPARKTKKASKSKAPPAEREDQTPAQEPS QTS
tggtcagagacatcaagaaataacgccggaacattagtgcaggcagcttccacagcaatggcatcctggtcatccagcggatagttaatgatcagcccactgacgcgttgcgcgagaagattgtgcaccgccgctttacaggcttcgacgccgcttcgttctaccatcgacaccaccacgctggcacccagttgatcggcgcgagatttaatcgccgcgacaatttgcgacggcgcgtgcagggccagactggaggtggcaacgccaatcagcaacgactgtttgcccgccagttgttgtgccacgcggttgggaatgtaattcagctccgccatcgccgcttccactttttcccgcgttttcgcagaaacgtggctggcctggttcaccacgcgggaaacggtctgataagagacaccggcatactctgcgacatcgtataacgttactggtttcacattcaccaccctgaattgactctcttccgggcgctatcatgccataccgcgaaaggttttgcgccattcgatggtgtccgggatctcgacgctctcccttatgcgactcctgcattaggaagcagcccagtagtaggttgaggccgttgagcaccgccgccgcaaggaatggtgcatgcaaggagatggcgcccaacagtcccccggccacggggcctgccaccatacccacgccgaaacaagcgctcatgagcccgaagtggcgagcccgatcttccccatcggtgatgtcggcgatataggcgccagcaaccgcacctgtggcgccggtgatgccggccacgatgcgtccggcgtagaggatcgagatctcgatcccgcgaaattaatacgactcactataggggaattgtgagcggataacaattcccctctagaaataattttgtttaactttaagaaggagatatacatatgccgtattttaacgaactgaacgaaaaagaaacccgcagcaaagaaaccgaaagcggcatgccgaaaccggcggtggagagcgagttcagcaaggttctgaagaaacacttcccgggcgagcgttttcgtagcagctacatgaaacgtggtggcaagatcctggcggcgcaaggcgaggaagcggtggttgcgtatctgcagggcaaaagcgaggaagagccgccgaacttccaaccgccggcgaaatgccacgtggttaccaagagccgtgactttgcggagtggccgattatgaaggcgagcgaagcgatccagcgttacatttatgcgctgagcaccaccgagcgtgcggcgtgcaaaccgggcaagagcagcgaaagccatgcggcgtggtttgcggcgaccggcgtgagcaaccacggctacagccacgttcaaggcctgaacctgatctttgaccacaccctgggtcgttatgatggcgtgctgaagaaagttcagctgcgtaacgagaaagcgcgtgcgcgtctggaaagcatcaacgcgagccgtgcggatgagggtctgccggaaattaaggcggaagaggaagaggtggcgaccaacgaaaccggccacctgctgcagccgccgggtatcaacccgagcttttacgtttatcaaaccattagcccgcaggcgtaccgtccgcgtgacgagattgtgctgccgccggaatacgcgggttatgttcgtgatccgaacgcgccgattccgctgggcgtggttcgtaaccgttgcgacatccaaaaaggttgcccgggctacattccggagtggcagcgtgaagcgggtaccgcgatcagcccgaaaaccggcaaggcggtgaccgttccgggtctgagcccgaagaaaaacaagcgtatgcgtcgttattggcgtagcgagaaagaaaaggcgcaagatgcgctgctggtgaccgttcgtatcggtaccgactgggtggttattgatgttcgtggcctgctgcgtaacgcgcgttggcgtaccatcgcgccgaaagacattagcctgaacgcgctgctggacctgttcaccggcgacccggtgatcgatgttcgtcgtaacattgttacctttacctacaccctggacgcgtgcggtacctatgcgcgtaagtggaccctgaaaggcaagcagaccaaagcgaccctggacaagctgaccgcgacccaaaccgtggcgctggttgcgatcgatctgggtcagaccaacccgatcagcgcgggcattagccgtgtgacccaagagaacggtgcgctgcagtgcgaaccgctggaccgtttcaccctgccggacgatctgctgaaagacatcagcgcgtaccgtattgcgtgggatcgtaacgaagaggaactgcgtgcgcgtagcgttgaggcgctgccggaagcgcagcaagcggaagtgcgtgcgctggatggtgttagcaaggaaaccgcgcgtacccaactgtgcgcggacttcggtctggacccgaaacgtctgccgtgggacaagatgagcagcaacaccacctttatcagcgaggcgctgctgagcaacagcgtgagccgtgatcaggttttctttaccccggcgccgaagaaaggtgcgaagaaaaaggcgccggtggaagttatgcgtaaagaccgtacctgggcgcgtgcgtataagccgcgtctgagcgtggaggcgcagaaactgaagaacgaagcgctgtgggcgctgaaacgtaccagcccggagtacctgaaactgagccgtcgtaaagaggagctgtgccgtcgtagcatcaactatgtgattgagaagacccgtcgtcgtacccagtgccaaatcgtgattccggttattgaagacctgaacgttcgtttctttcacggtagcggcaaacgtctgccgggttgggataacttctttaccgcgaaaaaggaaaaccgttggttcatccaaggcctgcacaaggcgtttagcgacctgcgtacccaccgtagcttctacgtgtttgaggttcgtccggaacgtaccagcattacctgcccgaaatgcggtcactgcgaggttggtaaccgtgatggcgaagcgttccagtgcctgagctgcggcaagacctgcaacgcggacctggatgtggcgacccacaacctgacccaagttgcgctgaccggcaaaaccatgccgaagcgtgaggaaccgcgtgacgcgcagggtaccgcgccggcgcgtaaaaccaaaaaggcgagcaaaagcaaggctccgccggcggagcgtgaagatcaaaccccggcgcaagagccgagccagaccagctaaggtacccttgaggtgctgtttcagggaccaggaggtagtggatctgcttggagccatccacagttcgaaaaaggtggaggttctggcggtggatcaggtggaagtgcatggtctcaccctcagtttgagaaataaggatccggctgctaacaaagcccgaaaggaagctgagttggctgctgccaccgctgagcaataactagcataaccccttggggcctctaaacgggtcttgaggggttttttgctgaaaggaggaactatatccggatatcccgcaagaggcccggcagtaccggcataaccaagcctatgcctacagcatccagggtgacggtgccgaggatgacgatgagcgcattgttagatttcatacacggtgcctgactgcgttagcaatttaactgtgataaactaccgcattaaagcttatcgatgataagctgtcaaacatgagaattcttgaagacgaaagggcctcgtgatacgcctatttttataggttaatgtcatgataataatggtttcttagacgtcaggtggcacttttcggggaaatgtgcgcggaacccctatttgtttatttttctaaatacattcaaatatgtatccgctcatgagacaataaccctgataaatgcttcaataatattgaaaaaggaagagtatgagtattcaacatttccgtgtcgcccttattcccttttttgcggcattttgccttcctgtttttgctcacccagaaacgctggtgaaagtaaaagatgctgaagatcagttgggtgcacgagtgggttacatcgaactggatctcaacagcggtaagatccttgagagttttcgccccgaagaacgttttccaatgatgagcacttttaaagttctgctatgtggcgcggtattatcccgtgttgacgccgggcaagagcaactcggtcgccgcatacactattctcagaatgacttggttgagtactcaccagtcacagaaaagcatcttacggatggcatgacagtaagagaattatgcagtgctgccataaccatgagtgataacactgcggccaacttacttctgacaacgatcggaggaccgaaggagctaaccgcttttttgcacaacatgggggatcatgtaactcgccttgatcgttgggaaccggagctgaatgaagccataccaaacgacgagcgtgacaccacgatgcctgcagcaatggcaacaacgttgcgcaaactattaactggcgaactacttactctagcttcccggcaacaattaatagactggatggaggcggataaagttgcaggaccacttctgcgctcggcccttccggctggctggtttattgctgataaatctggagccggtgagcgtgggtctcgcggtatcattgcagcactggggccagatggtaagccctcccgtatcgtagttatctacacgacggggagtcaggcaactatggatgaacgaaatagacagatcgctgagataggtgcctcactgattaagcattggtaactgtcagaccaagtttactcatatatactttagattgatttaaaacttcatttttaatttaaaaggatctaggtgaagatcctttttgataatctcatgaccaaaatcccttaacgtgagttttcgttccactgagcgtcagaccccgtagaaaagatcaaaggatcttcttgagatcctttttttctgcgcgtaatctgctgcttgcaaacaaaaaaaccaccgctaccagcggtggtttgtttgccggatcaagagctaccaactctttttccgaaggtaactggcttcagcagagcgcagataccaaatactgtccttctagtgtagccgtagttaggccaccacttcaagaactctgtagcaccgcctacatacctcgctctgctaatcctgttaccagtggctgctgccagtggcgataagtcgtgtcttaccgggttggactcaagacgatagttaccggataaggcgcagcggtcgggctgaacggggggttcgtgcacacagcccagcttggagcgaacgacctacaccgaactgagatacctacagcgtgagctatgagaaagcgccacgcttcccgaagggagaaaggcggacaggtatccggtaagcggcagggtcggaacaggagagcgcacgagggagcttccagggggaaacgcctggtatctttatagtcctgtcgggtttcgccacctctgacttgagcgtcgatttttgtgatgctcgtcaggggggcggagcctatggaaaaacgccagcaacgcggcctttttacggttcctggccttttgctggccttttgctcacatgttctttcctgcgttatcccctgattctgtggataaccgtattaccgcctttgagtgagctgataccgctcgccgcagccgaacgaccgagcgcagcgagtcagtgagcgaggaagcggaagagcgcctgatgcggtattttctccttacgcatctgtgcggtatttcacaccgcatatatggtgcactctcagtacaatctgctctgatgccgcatagttaagccagtatacactccgctatcgctacgtgactgggtcatggctgcgccccgacacccgccaacacccgctgacgcgccctgacgggcttgtctgctcccggcatccgcttacagacaagctgtgaccgtctccgggagctgcatgtgtcagaggttttcaccgtcatcaccgaaacgcgcgaggcagctgcggtaaagctcatcagcgtggtcgtgaagcgattcacagatgtctgcctgttcatccgcgtccagctcgttgagtttctccagaagcgttaatgtctggcttctgataaagcgggccatgttaagggcggttttttcctgtttggtcactgatgcctccgtgtaagggggatttctgttcatgggggtaatgataccgatgaaacgagagaggatgctcacgatacgggttactgatgatgaacatgcccggttactggaacgttgtgagggtaaacaactggcggtatggatgcggcgggaccagagaaaaatcactcagggtcaatgccagcgcttcgttaatacagatgtaggtgttccacagggtagccagcagcatcctgcgatgcagatccggaacataatggtgcagggcgctgacttccgcgtttccagactttacgaaacacggaaaccgaagaccattcatgttgttgctcaggtcgcagacgttttgcagcagcagtcgcttcacgttcgctcgcgtatcggtgattcattctgctaaccagtaaggcaaccccgccagcctagccgggtcctcaacgacaggagcacgatcatgcgcacccgtggccaggacccaacgctgcccgagatgcgccgcgtgcggctgctggagatggcggacgcgatggatatgttctgccaagggttggtttgcgcattcacagttctccgcaagaattgattggctccaattcttggagtggtgaatccgttagcgaggtgccgccggcttccattcaggtcgaggtggcccggctccatgcaccgcgacgcaacgcggggaggcagacaaggtatagggcggcgcctacaatccatgccaacccgttccatgtgctcgccgaggcggcataaatcgccgtgacgatcagcggtccagtgatcgaagttaggctggtaagagccgcgagcgatccttgaagctgtccctgatggtcgtcatctacctgcctggacagcatggcctgcaacgcgggcatcccgatgccgccggaagcgagaagaatcataatggggaaggccatccagcctcgcgtcgcgaacgccagcaagacgtagcccagcgcgtcggccgccatgccggcgataatggcctgcttctcgccgaaacgtttggtggcgggaccagtgacgaaggcttgagcgagggcgtgcaagattccgaataccgcaagcgacaggccgatcatcgtcgcgctccagcgaaagcggtcctcgccgaaaatgacccagagcgctgccggcacctgtcctacgagttgcatgataaagaagacagtcataagtgcggcgacgatagtcatgccccgcgcccaccggaaggagctgactgggttgaaggctctcaagggcatcggtcgagatcccggtgcctaatgagtgagctaacttacattaattgcgttgcgctcactgcccgctttccagtcgggaaacctgtcgtgccagctgcattaatgaatcggccaacgcgcggggagaggcggtttgcgtattgggcgccagggtggtttttcttttcaccagtgagacgggcaacagctgattgcccttcaccgcctggccctgagagagttgcagcaagcggtccacgctggtttgccccagcaggcgaaaatcctgtttgatggtggttaacggcgggatataacatgagctgtcttcggtatcgtcgtatcccactaccgagatatccgcaccaacgcgcagcccggactcggtaatggcgcgcattgcgcccagcgccatctgatcgttggcaaccagcatcgcagtgggaacgatgccctcattcagcatttgcatggtttgttgaaaaccggacatggcactccagtcgccttcccgttccgctatcggctgaatttgattgcgagtgagatatttatgccagccagccagacgcagacgcgccgagacagaacttaatgggcccgctaacagcgcgatttgctggtgacccaatgcgaccagatgctccacgcccagtcgcgtaccgtcttcatgggagaaaataatactgttgatgggtgtc

SEQ ID NO: 267 - protein, 20 aa, Erwinia persicina
MPYFNELNEKETRSKETESG

SEQ ID NO: 268 - protein, 757 aa, Erwinia persicina; identical to SEQ ID NO: 99

SEQ ID NO: 269 - DNA, 8110 bp, Serratia entomophila
  source 1..8110: mol_type = other DNA; note = 18_seafp17n20-casphi2-pet11a_U9784IC070-18
  CDS 933..992: note = SEAfp17NT20; protein_id = 270; translation = MPTKTPQLQLAIEEFNKAIL
  CDS 993..3263: note = Casphi2; protein_id = 271; translation = MPKPAVESEFSKVLKKHFPGERFRSSYMKRGGKILAAQGEEAVVAY LQGKSEEEPPNFQPPAKCHVVTKSRDFAEWPIMKASEAIQRYIYALSTTERAACKPGKS SESHAAWFAATGVSNHGYSHVQGLNLIFDHTLGRYDGVLKKVQLRNEKARARLESINAS RADEGLPEIKAEEEEVATNETGHLLQPPGINPSFYVYQTISPQAYRPRDEIVLPPEYAG YVRDPNAPIPLGVVRNRCDIQKGCPGYIPEWQREAGTAISPKTGKAVTVPGLSPKKNKR MRRYWRSEKEKAQDALLVTVRIGTDWVVIDVRGLLRNARWRTIAPKDISLNALLDLFTG DPVIDVRRNIVTFTYTLDACGTYARKWTLKGKQTKATLDKLTATQTVALVAIDLGQTNP ISAGISRVTQENGALQCEPLDRFTLPDDLLKDISAYRIAWDRNEEELRARSVEALPEAQ QAEVRALDGVSKETARTQLCADFGLDPKRLPWDKMSSNTTFISEALLSNSVSRDQVFFT PAPKKGAKKKAPVEVMRKDRTWARAYKPRLSVEAQKLKNEALWALKRTSPEYLKLSRRK EELCRRSINYVIEKTRRRTQCQIVIPVIEDLNVRFFHGSGKRLPGWDNFFTAKKENRWF IQGLHKAFSDLRTHRSFYVFEVRPERTSITCPKCGHCEVGNRDGEAFQCLSCGKTCNAD LDVATHNLTQVALTGKTMPKREEPRDAQGTAPARKTKKASKSKAPPAEREDQTPAQEPS QTS
tggtcagagacatcaagaaataacgccggaacattagtgcaggcagcttccacagcaatggcatcctggtcatccagcggatagttaatgatcagcccactgacgcgttgcgcgagaagattgtgcaccgccgctttacaggcttcgacgccgcttcgttctaccatcgacaccaccacgctggcacccagttgatcggcgcgagatttaatcgccgcgacaatttgcgacggcgcgtgcagggccagactggaggtggcaacgccaatcagcaacgactgtttgcccgccagttgttgtgccacgcggttgggaatgtaattcagctccgccatcgccgcttccactttttcccgcgttttcgcagaaacgtggctggcctggttcaccacgcgggaaacggtctgataagagacaccggcatactctgcgacatcgtataacgttactggtttcacattcaccaccctgaattgactctcttccgggcgctatcatgccataccgcgaaaggttttgcgccattcgatggtgtccgggatctcgacgctctcccttatgcgactcctgcattaggaagcagcccagtagtaggttgaggccgttgagcaccgccgccgcaaggaatggtgcatgcaaggagatggcgcccaacagtcccccggccacggggcctgccaccatacccacgccgaaacaagcgctcatgagcccgaagtggcgagcccgatcttccccatcggtgatgtcggcgatataggcgccagcaaccgcacctgtggcgccggtgatgccggccacgatgcgtccggcgtagaggatcgagatctcgatcccgcgaaattaatacgactcactataggggaattgtgagcggataacaattcccctctagaaataattttgtttaactttaagaaggagatatacatatgccgactaaaacaccacagttacagctggcgatcgaagaatttaataaagcaatattaatgccgaaaccggcggtggagagcgagttcagcaaggttctgaagaaacacttcccgggcgagcgttttcgtagcagctacatgaaacgtggtggcaagatcctggcggcgcaaggcgaggaagcggtggttgcgtatctgcagggcaaaagcgaggaagagccgccgaacttccaaccgccggcgaaatgccacgtggttaccaagagccgtgactttgcggagtggccgattatgaaggcgagcgaagcgatccagcgttacatttatgcgctgagcaccaccgagcgtgcggcgtgcaaaccgggcaagagcagcgaaagccatgcggcgtggtttgcggcgaccggcgtgagcaaccacggctacagccacgttcaaggcctgaacctgatctttgaccacaccctgggtcgttatgatggcgtgctgaagaaagttcagctgcgtaacgagaaagcgcgtgcgcgtctggaaagcatcaacgcgagccgtgcggatgagggtctgccggaaattaaggcggaagaggaagaggtggcgaccaacgaaaccggccacctgctgcagccgccgggtatcaacccgagcttttacgtttatcaaaccattagcccgcaggcgtaccgtccgcgtgacgagattgtgctgccgccggaatacgcgggttatgttcgtgatccgaacgcgccgattccgctgggcgtggttcgtaaccgttgcgacatccaaaaaggttgcccgggctacattccggagtggcagcgtgaagcgggtaccgcgatcagcccgaaaaccggcaaggcggtgaccgttccgggtctgagcccgaagaaaaacaagcgtatgcgtcgttattggcgtagcgagaaagaaaaggcgcaagatgcgctgctggtgaccgttcgtatcggtaccgactgggtggttattgatgttcgtggcctgctgcgtaacgcgcgttggcgtaccatcgcgccgaaagacattagcctgaacgcgctgctggacctgttcaccggcgacccggtgatcgatgttcgtcgtaacattgttacctttacctacaccctggacgcgtgcggtacctatgcgcgtaagtggaccctgaaaggcaagcagaccaaagcgaccctggacaagctgaccgcgacccaaaccgtggcgctggttgcgatcgatctgggtcagaccaacccgatcagcgcgggcattagccgtgtgacccaagagaacggtgcgctgcagtgcgaaccgctggaccgtttcaccctgccggacgatctgctgaaagacatcagcgcgtaccgtattgcgtgggatcgtaacgaagaggaactgcgtgcgcgtagcgttgaggcgctgccggaagcgcagcaagcggaagtgcgtgcgctggatggtgttagcaaggaaaccgcgcgtacccaactgtgcgcggacttcggtctggacccgaaacgtctgccgtgggacaagatgagcagcaacaccacctttatcagcgaggcgctgctgagcaacagcgtgagccgtgatcaggttttctttaccccggcgccgaagaaaggtgcgaagaaaaaggcgccggtggaagttatgcgtaaagaccgtacctgggcgcgtgcgtataagccgcgtctgagcgtggaggcgcagaaactgaagaacgaagcgctgtgggcgctgaaacgtaccagcccggagtacctgaaactgagccgtcgtaaagaggagctgtgccgtcgtagcatcaactatgtgattgagaagacccgtcgtcgtacccagtgccaaatcgtgattccggttattgaagacctgaacgttcgtttctttcacggtagcggcaaacgtctgccgggttgggataacttctttaccgcgaaaaaggaaaaccgttggttcatccaaggcctgcacaaggcgtttagcgacctgcgtacccaccgtagcttctacgtgtttgaggttcgtccggaacgtaccagcattacctgcccgaaatgcggtcactgcgaggttggtaaccgtgatggcgaagcgttccagtgcctgagctgcggcaagacctgcaacgcggacctggatgtggcgacccacaacctgacccaagttgcgctgaccggcaaaaccatgccgaagcgtgaggaaccgcgtgacgcgcagggtaccgcgccggcgcgtaaaaccaaaaaggcgagcaaaagcaaggctccgccggcggagcgtgaagatcaaaccccggcgcaagagccgagccagaccagctaaggtacccttgaggtgctgtttcagggaccaggaggtagtggatctgcttggagccatccacagttcgaaaaaggtggaggttctggcggtggatcaggtggaagtgcatggtctcaccctcagtttgagaaataaggatccggctgctaacaaagcccgaaaggaagctgagttggctgctgccaccgctgagcaataactagcataaccccttggggcctctaaacgggtcttgaggggttttttgctgaaaggaggaactatatccggatatcccgcaagaggcccggcagtaccggcataaccaagcctatgcctacagcatccagggtgacggtgccgaggatgacgatgagcgcattgttagatttcatacacggtgcctgactgcgttagcaatttaactgtgataaactaccgcattaaagcttatcgatgataagctgtcaaacatgagaattcttgaagacgaaagggcctcgtgatacgcctatttttataggttaatgtcatgataataatggtttcttagacgtcaggtggcacttttcggggaaatgtgcgcggaacccctatttgtttatttttctaaatacattcaaatatgtatccgctcatgagacaataaccctgataaatgcttcaataatattgaaaaaggaagagtatgagtattcaacatttccgtgtcgcccttattcccttttttgcggcattttgccttcctgtttttgctcacccagaaacgctggtgaaagtaaaagatgctgaagatcagttgggtgcacgagtgggttacatcgaactggatctcaacagcggtaagatccttgagagttttcgccccgaagaacgttttccaatgatgagcacttttaaagttctgctatgtggcgcggtattatcccgtgttgacgccgggcaagagcaactcggtcgccgcatacactattctcagaatgacttggttgagtactcaccagtcacagaaaagcatcttacggatggcatgacagtaagagaattatgcagtgctgccataaccatgagtgataacactgcggccaacttacttctgacaacgatcggaggaccgaaggagctaaccgcttttttgcacaacatgggggatcatgtaactcgccttgatcgttgggaaccggagctgaatgaagccataccaaacgacgagcgtgacaccacgatgcctgcagcaatggcaacaacgttgcgcaaactattaactggcgaactacttactctagcttcccggcaacaattaatagactggatggaggcggataaagttgcaggaccacttctgcgctcggcccttccggctggctggtttattgctgataaatctggagccggtgagcgtgggtctcgcggtatcattgcagcactggggccagatggtaagccctcccgtatcgtagttatctacacgacggggagtcaggcaactatggatgaacgaaatagacagatcgctgagataggtgcctcactgattaagcattggtaactgtcagaccaagtttactcatatatactttagattgatttaaaacttcatttttaatttaaaaggatctaggtgaagatcctttttgataatctcatgaccaaaatcccttaacgtgagttttcgttccactgagcgtcagaccccgtagaaaagatcaaaggatcttcttgagatcctttttttctgcgcgtaatctgctgcttgcaaacaaaaaaaccaccgctaccagcggtggtttgtttgccggatcaagagctaccaactctttttccgaaggtaactggcttcagcagagcgcagataccaaatactgtccttctagtgtagccgtagttaggccaccacttcaagaactctgtagcaccgcctacatacctcgctctgctaatcctgttaccagtggctgctgccagtggcgataagtcgtgtcttaccgggttggactcaagacgatagttaccggataaggcgcagcggtcgggctgaacggggggttcgtgcacacagcccagcttggagcgaacgacctacaccgaactgagatacctacagcgtgagctatgagaaagcgccacgcttcccgaagggagaaaggcggacaggtatccggtaagcggcagggtcggaacaggagagcgcacgagggagcttccagggggaaacgcctggtatctttatagtcctgtcgggtttcgccacctctgacttgagcgtcgatttttgtgatgctcgtcaggggggcggagcctatggaaaaacgccagcaacgcggcctttttacggttcctggccttttgctggccttttgctcacatgttctttcctgcgttatcccctgattctgtggataaccgtattaccgcctttgagtgagctgataccgctcgccgcagccgaacgaccgagcgcagcgagtcagtgagcgaggaagcggaagagcgcctgatgcggtattttctccttacgcatctgtgcggtatttcacaccgcatatatggtgcactctcagtacaatctgctctgatgccgcatagttaagccagtatacactccgctatcgctacgtgactgggtcatggctgcgccccgacacccgccaacacccgctgacgcgccctgacgggcttgtctgctcccggcatccgcttacagacaagctgtgaccgtctccgggagctgcatgtgtcagaggttttcaccgtcatcaccgaaacgcgcgaggcagctgcggtaaagctcatcagcgtggtcgtgaagcgattcacagatgtctgcctgttcatccgcgtccagctcgttgagtttctccagaagcgttaatgtctggcttctgataaagcgggccatgttaagggcggttttttcctgtttggtcactgatgcctccgtgtaagggggatttctgttcatgggggtaatgataccgatgaaacgagagaggatgctcacgatacgggttactgatgatgaacatgcccggttactggaacgttgtgagggtaaacaactggcggtatggatgcggcgggaccagagaaaaatcactcagggtcaatgccagcgcttcgttaatacagatgtaggtgttccacagggtagccagcagcatcctgcgatgcagatccggaacataatggtgcagggcgctgacttccgcgtttccagactttacgaaacacggaaaccgaagaccattcatgttgttgctcaggtcgcagacgttttgcagcagcagtcgcttcacgttcgctcgcgtatcggtgattcattctgctaaccagtaaggcaaccccgccagcctagccgggtcctcaacgacaggagcacgatcatgcgcacccgtggccaggacccaacgctgcccgagatgcgccgcgtgcggctgctggagatggcggacgcgatggatatgttctgccaagggttggtttgcgcattcacagttctccgcaagaattgattggctccaattcttggagtggtgaatccgttagcgaggtgccgccggcttccattcaggtcgaggtggcccggctccatgcaccgcgacgcaacgcggggaggcagacaaggtatagggcggcgcctacaatccatgccaacccgttccatgtgctcgccgaggcggcataaatcgccgtgacgatcagcggtccagtgatcgaagttaggctggtaagagccgcgagcgatccttgaagctgtccctgatggtcgtcatctacctgcctggacagcatggcctgcaacgcgggcatcccgatgccgccggaagcgagaagaatcataatggggaaggccatccagcctcgcgtcgcgaacgccagcaagacgtagcccagcgcgtcggccgccatgccggcgataatggcctgcttctcgccgaaacgtttggtggcgggaccagtgacgaaggcttgagcgagggcgtgcaagattccgaataccgcaagcgacaggccgatcatcgtcgcgctccagcgaaagcggtcctcgccgaaaatgacccagagcgctgccggcacctgtcctacgagttgcatgataaagaagacagtcataagtgcggcgacgatagtcatgccccgcgcccaccggaaggagctgactgggttgaaggctctcaagggcatcggtcgagatcccggtgcctaatgagtgagctaacttacattaattgcgttgcgctcactgcccgctttccagtcgggaaacctgtcgtgccagctgcattaatgaatcggccaacgcgcggggagaggcggtttgcgtattgggcgccagggtggtttttcttttcaccagtgagacgggcaacagctgattgcccttcaccgcctggccctgagagagttgcagcaagcggtccacgctggtttgccccagcaggcgaaaatcctgtttgatggtggttaacggcgggatataacatgagctgtcttcggtatcgtcgtatcccactaccgagatatccgcaccaacgcgcagcccggactcggtaatggcgcgcattgcgcccagcgccatctgatcgttggcaaccagcatcgcagtgggaacgatgccctcattcagcatttgcatggtttgttgaaaaccggacatggcactccagtcgccttcccgttccgctatcggctgaatttgattgcgagtgagatatttatgccagccagccagacgcagacgcgccgagacagaacttaatgggcccgctaacagcgcgatttgctggtgacccaatgcgaccagatgctccacgcccagtcgcgtaccgtcttcatgggagaaaataatactgttgatgggtgtc

SEQ ID NO: 270 - protein, 20 aa, Serratia entomophila
MPTKTPQLQLAIEEFNKAIL

SEQ ID NO: 271 - protein, 757 aa, Serratia entomophila; identical to SEQ ID NO: 99

SEQ ID NO: 272 - DNA, 8110 bp, Pseudomonas aeruginosa
  source 1..8110: mol_type = other DNA; note = 5_exount20-casphi2-pet11a_U9784IC070-5
  CDS 933..992: note = ExoUNT20; protein_id = 273; translation = MHIQSLGATASSLNQEPVET
  CDS 993..3263: note = Casphi2; protein_id = 274; translation = MPKPAVESEFSKVLKKHFPGERFRSSYMKRGGKILAAQGEEAVVAY LQGKSEEEPPNFQPPAKCHVVTKSRDFAEWPIMKASEAIQRYIYALSTTERAACKPGKS SESHAAWFAATGVSNHGYSHVQGLNLIFDHTLGRYDGVLKKVQLRNEKARARLESINAS RADEGLPEIKAEEEEVATNETGHLLQPPGINPSFYVYQTISPQAYRPRDEIVLPPEYAG YVRDPNAPIPLGVVRNRCDIQKGCPGYIPEWQREAGTAISPKTGKAVTVPGLSPKKNKR MRRYWRSEKEKAQDALLVTVRIGTDWVVIDVRGLLRNARWRTIAPKDISLNALLDLFTG DPVIDVRRNIVTFTYTLDACGTYARKWTLKGKQTKATLDKLTATQTVALVAIDLGQTNP ISAGISRVTQENGALQCEPLDRFTLPDDLLKDISAYRIAWDRNEEELRARSVEALPEAQ QAEVRALDGVSKETARTQLCADFGLDPKRLPWDKMSSNTTFISEALLSNSVSRDQVFFT PAPKKGAKKKAPVEVMRKDRTWARAYKPRLSVEAQKLKNEALWALKRTSPEYLKLSRRK EELCRRSINYVIEKTRRRTQCQIVIPVIEDLNVRFFHGSGKRLPGWDNFFTAKKENRWF IQGLHKAFSDLRTHRSFYVFEVRPERTSITCPKCGHCEVGNRDGEAFQCLSCGKTCNAD LDVATHNLTQVALTGKTMPKREEPRDAQGTAPARKTKKASKSKAPPAEREDQTPAQEPS QTS
tggtcagagacatcaagaaataacgccggaacattagtgcaggcagcttccacagcaatggcatcctggtcatccagcggatagttaatgatcagcccactgacgcgttgcgcgagaagattgtgcaccgccgctttacaggcttcgacgccgcttcgttctaccatcgacaccaccacgctggcacccagttgatcggcgcgagatttaatcgccgcgacaatttgcgacggcgcgtgcagggccagactggaggtggcaacgccaatcagcaacgactgtttgcccgccagttgttgtgccacgcggttgggaatgtaattcagctccgccatcgccgcttccactttttcccgcgttttcgcagaaacgtggctggcctggttcaccacgcgggaaacggtctgataagagacaccggcatactctgcgacatcgtataacgttactggtttcacattcaccaccctgaattgactctcttccgggcgctatcatgccataccgcgaaaggttttgcgccattcgatggtgtccgggatctcgacgctctcccttatgcgactcctgcattaggaagcagcccagtagtaggttgaggccgttgagcaccgccgccgcaaggaatggtgcatgcaaggagatggcgcccaacagtcccccggccacggggcctgccaccatacccacgccgaaacaagcgctcatgagcccgaagtggcgagcccgatcttccccatcggtgatgtcggcgatataggcgccagcaaccgcacctgtggcgccggtgatgccggccacgatgcgtccggcgtagaggatcgagatctcgatcccgcgaaattaatacgactcactataggggaattgtgagcggataacaattcccctctagaaataattttgtttaactttaagaaggagatatacatatgcatattcagagcctgggcgcgaccgcgagcagcctgaaccaggaaccggtggaaaccatgccgaaaccggcggtggagagcgagttcagcaaggttctgaagaaacacttcccgggcgagcgttttcgtagcagctacatgaaacgtggtggcaagatcctggcggcgcaaggcgaggaagcggtggttgcgtatctgcagggcaaaagcgaggaagagccgccgaacttccaaccgccggcgaaatgccacgtggttaccaagagccgtgactttgcggagtggccgattatgaaggcgagcgaagcgatccagcgttacatttatgcgctgagcaccaccgagcgtgcggcgtgcaaaccgggcaagagcagcgaaagccatgcggcgtggtttgcggcgaccggcgtgagcaaccacggctacagccacgttcaaggcctgaacctgatctttgaccacaccctgggtcgttatgatggcgtgctgaagaaagttcagctgcgtaacgagaaagcgcgtgcgcgtctggaaagcatcaacgcgagccgtgcggatgagggtctgccggaaattaaggcggaagaggaagaggtggcgaccaacgaaaccggccacctgctgcagccgccgggtatcaacccgagcttttacgtttatcaaaccattagcccgcaggcgtaccgtccgcgtgacgagattgtgctgccgccggaatacgcgggttatgttcgtgatccgaacgcgccgattccgctgggcgtggttcgtaaccgttgcgacatccaaaaaggttgcccgggctacattccggagtggcagcgtgaagcgggtaccgcgatcagcccgaaaaccggcaaggcggtgaccgttccgggtctgagcccgaagaaaaacaagcgtatgcgtcgttattggcgtagcgagaaagaaaaggcgcaagatgcgctgctggtgaccgttcgtatcggtaccgactgggtggttattgatgttcgtggcctgctgcgtaacgcgcgttggcgtaccatcgcgccgaaagacattagcctgaacgcgctgctggacctgttcaccggcgacccggtgatcgatgttcgtcgtaacattgttacctttacctacaccctggacgcgtgcggtacctatgcgcgtaagtggaccctgaaaggcaagcagaccaaagcgaccctggacaagctgaccgcgacccaaaccgtggcgctggttgcgatcgatctgggtcagaccaacccgatcagcgcgggcattagccgtgtgacccaagagaacggtgcgctgcagtgcgaaccgctggaccgtttcaccctgccggacgatctgctgaaagacatcagcgcgtaccgtattgcgtgggatcgtaacgaagaggaactgcgtgcgcgtagcgttgaggcgctgccggaagcgcagcaagcggaagtgcgtgcgctggatggtgttagcaaggaaaccgcgcgtacccaactgtgcgcggacttcggtctggacccgaaacgtctgccgtgggacaagatgagcagcaacaccacctttatcagcgaggcgctgctgagcaacagcgtgagccgtgatcaggttttctttaccccggcgccgaagaaaggtgcgaagaaaaaggcgccggtggaagttatgcgtaaagaccgtacctgggcgcgtgcgtataagccgcgtctgagcgtggaggcgcagaaactgaagaacgaagcgctgtgggcgctgaaacgtaccagcccggagtacctgaaactgagccgtcgtaaagaggagctgtgccgtcgtagcatcaactatgtgattgagaagacccgtcgtcgtacccagtgccaaatcgtgattccggttattgaagacctgaacgttcgtttctttcacggtagcggcaaacgtctgccgggttgggataacttctttaccgcgaaaaaggaaaaccgttggttcatccaaggcctgcacaaggcgtttagcgacctgcgtacccaccgtagcttctacgtgtttgaggttcgtccggaacgtaccagcattacctgcccgaaatgcggtcactgcgaggttggtaaccgtgatggcgaagcgttccagtgcctgagctgcggcaagacctgcaacgcggacctggatgtggcgacccacaacctgacccaagttgcgctgaccggcaaaaccatgccgaagcgtgaggaaccgcgtgacgcgcagggtaccgcgccggcgcgtaaaaccaaaaaggcgagcaaaagcaaggctccgccggcggagcgtgaagatcaaaccccggcgcaagagccgagccagaccagctaaggtacccttgaggtgctgtttcagggaccaggaggtagtggatctgcttggagccatccacagttcgaaaaaggtggaggttctggcggtggatcaggtggaagtgcatggtctcaccctcagtttgagaaataaggatccggctgctaacaaagcccgaaaggaagctgagttggctgctgccaccgctgagcaataactagcataaccccttggggcctctaaacgggtcttgaggggttttttgctgaaaggaggaactatatccggatatcccgcaagaggcccggcagtaccggcataaccaagcctatgcctacagcatccagggtgacggtgccgaggatgacgatgagcgcattgttagatttcatacacggtgcctgactgcgttagcaatttaactgtgataaactaccgcattaaagcttatcgatgataagctgtcaaacatgagaattcttgaagacgaaagggcctcgtgatacgcctatttttataggttaatgtcatgataataatggtttcttagacgtcaggtggcacttttcggggaaatgtgcgcggaacccctatttgtttatttttctaaatacattcaaatatgtatccgctcatgagacaataaccctgataaatgcttcaataatattgaaaaaggaagagtatgagtattcaacatttccgtgtcgcccttattcccttttttgcggcattttgccttcctgtttttgctcacccagaaacgctggtgaaagtaaaagatgctgaagatcagttgggtgcacgagtgggttacatcgaactggatctcaacagcggtaagatccttgagagttttcgccccgaagaacgttttccaatgatgagcacttttaaagttctgctatgtggcgcggtattatcccgtgttgacgccgggcaagagcaactcggtcgccgcatacactattctcagaatgacttggttgagtactcaccagtcacagaaaagcatcttacggatggcatgacagtaagagaattatgcagtgctgccataaccatgagtgataacactgcggccaacttacttctgacaacgatcggaggaccgaaggagctaaccgcttttttgcacaacatgggggatcatgtaactcgccttgatcgttgggaaccggagctgaatgaagccataccaaacgacgagcgtgacaccacgatgcctgcagcaatggcaacaacgttgcgcaaactattaactggcgaactacttactctagcttcccggcaacaattaatagactggatggaggcggataaagttgcaggaccacttctgcgctcggcccttccggctggctggtttattgctgataaatctggagccggtgagcgtgggtctcgcggtatcattgcagcactggggccagatggtaagccctcccgtatcgtagttatctacacgacggggagtcaggcaactatggatgaacgaaatagacagatcgctgagataggtgcctcactgattaagcattggtaactgtcagaccaagtttactcatatatactttagattgatttaaaacttcatttttaatttaaaaggatctaggtgaagatcctttttgataatctcatgaccaaaatcccttaacgtgagttttcgttccactgagcgtcagaccccgtagaaaagatcaaaggatcttcttgagatcctttttttctgcgcgtaatctgctgcttgcaaacaaaaaaaccaccgctaccagcggtggtttgtttgccggatcaagagctaccaactctttttccgaaggtaactggcttcagcagagcgcagataccaaatactgtccttctagtgtagccgtagttaggccaccacttcaagaactctgtagcaccgcctacatacctcgctctgctaatcctgttaccagtggctgctgccagtggcgataagtcgtgtcttaccgggttggactcaagacgatagttaccggataaggcgcagcggtcgggctgaacggggggttcgtgcacacagcccagcttggagcgaacgacctacaccgaactgagatacctacagcgtgagctatgagaaagcgccacgcttcccgaagggagaaaggcggacaggtatccggtaagcggcagggtcggaacaggagagcgcacgagggagcttccagggggaaacgcctggtatctttatagtcctgtcgggtttcgccacctctgacttgagcgtcgatttttgtgatgctcgtcaggggggcggagcctatggaaaaacgccagcaacgcggcctttttacggttcctggccttttgctggccttttgctcacatgttctttcctgcgttatcccctgattctgtggataaccgtattaccgcctttgagtgagctgataccgctcgccgcagccgaacgaccgagcgcagcgagtcagtgagcgaggaagcggaagagcgcctgatgcggtattttctccttacgcatctgtgcggtatttcacaccgcatatatggtgcactctcagtacaatctgctctgatgccgcatagttaagccagtatacactccgctatcgctacgtgactgggtcatggctgcgccccgacacccgccaacacccgctgacgcgccctgacgggcttgtctgctcccggcatccgcttacagacaagctgtgaccgtctccgggagctgcatgtgtcagaggttttcaccgtcatcaccgaaacgcgcgaggcagctgcggtaaagctcatcagcgtggtcgtgaagcgattcacagatgtctgcctgttcatccgcgtccagctcgttgagtttctccagaagcgttaatgtctggcttctgataaagcgggccatgttaagggcggttttttcctgtttggtcactgatgcctccgtgtaagggggatttctgttcatgggggtaatgataccgatgaaacgagagaggatgctcacgatacgggttactgatgatgaacatgcccggttactggaacgttgtgagggtaaacaactggcggtatggatgcggcgggaccagagaaaaatcactcagggtcaatgccagcgcttcgttaatacagatgtaggtgttccacagggtagccagcagcatcctgcgatgcagatccggaacataatggtgcagggcgctgacttccgcgtttccagactttacgaaacacggaaaccgaagaccattcatgttgttgctcaggtcgcagacgttttgcagcagcagtcgcttcacgttcgctcgcgtatcggtgattcattctgctaaccagtaaggcaaccccgccagcctagccgggtcctcaacgacaggagcacgatcatgcgcacccgtggccaggacccaacgctgcccgagatgcgccgcgtgcggctgctggagatggcggacgcgatggatatgttctgccaagggttggtttgcgcattcacagttctccgcaagaattgattggctccaattcttggagtggtgaatccgttagcgaggtgccgccggcttccattcaggtcgaggtggcccggctccatgcaccgcgacgcaacgcggggaggcagacaaggtatagggcggcgcctacaatccatgccaacccgttccatgtgctcgccgaggcggcataaatcgccgtgacgatcagcggtccagtgatcgaagttaggctggtaagagccgcgagcgatccttgaagctgtccctgatggtcgtcatctacctgcctggacagcatggcctgcaacgcgggcatcccgatgccgccggaagcgagaagaatcataatggggaaggccatccagcctcgcgtcgcgaacgccagcaagacgtagcccagcgcgtcggccgccatgccggcgataatggcctgcttctcgccgaaacgtttggtggcgggaccagtgacgaaggcttgagcgagggcgtgcaagattccgaataccgcaagcgacaggccgatcatcgtcgcgctccagcgaaagcggtcctcgccgaaaatgacccagagcgctgccggcacctgtcctacgagttgcatgataaagaagacagtcataagtgcggcgacgatagtcatgccccgcgcccaccggaaggagctgactgggttgaaggctctcaagggcatcggtcgagatcccggtgcctaatgagtgagctaacttacattaattgcgttgcgctcactgcccgctttccagtcgggaaacctgtcgtgccagctgcattaatgaatcggccaacgcgcggggagaggcggtttgcgtattgggcgccagggtggtttttcttttcaccagtgagacgggcaacagctgattgcccttcaccgcctggccctgagagagttgcagcaagcggtccacgctggtttgccccagcaggcgaaaatcctgtttgatggtggttaacggcgggatataacatgagctgtcttcggtatcgtcgtatcccactaccgagatatccgcaccaacgcgcagcccggactcggtaatggcgcgcattgcgcccagcgccatctgatcgttggcaaccagcatcgcagtgggaacgatgccctcattcagcatttgcatggtttgttgaaaaccggacatggcactccagtcgccttcccgttccgctatcggctgaatttgattgcgagtgagatatttatgccagccagccagacgcagacgcgccgagacagaacttaatgggcccgctaacagcgcgatttgctggtgacccaatgcgaccagatgctccacgcccagtcgcgtaccgtcttcatgggagaaaataatactgttgatgggtgtc

SEQ ID NO: 273 - protein, 20 aa, Pseudomonas aeruginosa
MHIQSLGATASSLNQEPVET

SEQ ID NO: 274 - protein, 757 aa, Pseudomonas aeruginosa; identical to SEQ ID NO: 99

SEQ ID NO: 275 - DNA, 8110 bp, Serratia entomophila
  source 1..8110: mol_type = other DNA; note = 20_seafp18n20kta-casphi2-pet11a_U9784IC070-20
  CDS 933..992: note = SEAfp18N20KtA; protein_id = 276; translation = MPYSSESAEAETHSAETERD
  CDS 993..3266: note = Casphi2; protein_id = 281; translation = MPKPAVESEFSKVLKKHFPGERFRSSYMKRGGKILAAQGEEAVVAY LQGKSEEEPPNFQPPAKCHVVTKSRDFAEWPIMKASEAIQRYIYALSTTERAACKPGKS SESHAAWFAATGVSNHGYSHVQGLNLIFDHTLGRYDGVLKKVQLRNEKARARLESINAS RADEGLPEIKAEEEEVATNETGHLLQPPGINPSFYVYQTISPQAYRPRDEIVLPPEYAG YVRDPNAPIPLGVVRNRCDIQKGCPGYIPEWQREAGTAISPKTGKAVTVPGLSPKKNKR MRRYWRSEKEKAQDALLVTVRIGTDWVVIDVRGLLRNARWRTIAPKDISLNALLDLFTG DPVIDVRRNIVTFTYTLDACGTYARKWTLKGKQTKATLDKLTATQTVALVAIDLGQTNP ISAGISRVTQENGALQCEPLDRFTLPDDLLKDISAYRIAWDRNEEELRARSVEALPEAQ QAEVRALDGVSKETARTQLCADFGLDPKRLPWDKMSSNTTFISEALLSNSVSRDQVFFT PAPKKGAKKKAPVEVMRKDRTWARAYKPRLSVEAQKLKNEALWALKRTSPEYLKLSRRK EELCRRSINYVIEKTRRRTQCQIVIPVIEDLNVRFFHGSGKRLPGWDNFFTAKKENRWF IQGLHKAFSDLRTHRSFYVFEVRPERTSITCPKCGHCEVGNRDGEAFQCLSCGKTCNAD LDVATHNLTQVALTGKTMPKREEPRDAQGTAPARKTKKASKSKAPPAEREDQTPAQEPS QTS
tggtcagagacatcaagaaataacgccggaacattagtgcaggcagcttccacagcaatggcatcctggtcatccagcggatagttaatgatcagcccactgacgcgttgcgcgagaagattgtgcaccgccgctttacaggcttcgacgccgcttcgttctaccatcgacaccaccacgctggcacccagttgatcggcgcgagatttaatcgccgcgacaatttgcgacggcgcgtgcagggccagactggaggtggcaacgccaatcagcaacgactgtttgcccgccagttgttgtgccacgcggttgggaatgtaattcagctccgccatcgccgcttccactttttcccgcgttttcgcagaaacgtggctggcctggttcaccacgcgggaaacggtctgataagagacaccggcatactctgcgacatcgtataacgttactggtttcacattcaccaccctgaattgactctcttccgggcgctatcatgccataccgcgaaaggttttgcgccattcgatggtgtccgggatctcgacgctctcccttatgcgactcctgcattaggaagcagcccagtagtaggttgaggccgttgagcaccgccgccgcaaggaatggtgcatgcaaggagatggcgcccaacagtcccccggccacggggcctgccaccatacccacgccgaaacaagcgctcatgagcccgaagtggcgagcccgatcttccccatcggtgatgtcggcgatataggcgccagcaaccgcacctgtggcgccggtgatgccggccacgatgcgtccggcgtagaggatcgagatctcgatcccgcgaaattaatacgactcactataggggaattgtgagcggataacaattcccctctagaaataattttgtttaactttaagaaggagatatacatatgccgtatagcagcgaaagcgcggaagcggaaacccatagcgcggaaaccgaacgcgatatgccgaaaccggcggtggagagcgagttcagcaaggttctgaagaaacacttcccgggcgagcgttttcgtagcagctacatgaaacgtggtggcaagatcctggcggcgcaaggcgaggaagcggtggttgcgtatctgcagggcaaaagcgaggaagagccgccgaacttccaaccgccggcgaaatgccacgtggttaccaagagccgtgactttgcggagtggccgattatgaaggcgagcgaagcgatccagcgttacatttatgcgctgagcaccaccgagcgtgcggcgtgcaaaccgggcaagagcagcgaaagccatgcggcgtggtttgcggcgaccggcgtgagcaaccacggctacagccacgttcaaggcctgaacctgatctttgaccacaccctgggtcgttatgatggcgtgctgaagaaagttcagctgcgtaacgagaaagcgcgtgcgcgtctggaaagcatcaacgcgagccgtgcggatgagggtctgccggaaattaaggcggaagaggaagaggtggcgaccaacgaaaccggccacctgctgcagccgccgggtatcaacccgagcttttacgtttatcaaaccattagcccgcaggcgtaccgtccgcgtgacgagattgtgctgccgccggaatacgcgggttatgttcgtgatccgaacgcgccgattccgctgggcgtggttcgtaaccgttgcgacatccaaaaaggttgcccgggctacattccggagtggcagcgtgaagcgggtaccgcgatcagcccgaaaaccggcaaggcggtgaccgttccgggtctgagcccgaagaaaaacaagcgtatgcgtcgttattggcgtagcgagaaagaaaaggcgcaagatgcgctgctggtgaccgttcgtatcggtaccgactgggtggttattgatgttcgtggcctgctgcgtaacgcgcgttggcgtaccatcgcgccgaaagacattagcctgaacgcgctgctggacctgttcaccggcgacccggtgatcgatgttcgtcgtaacattgttacctttacctacaccctggacgcgtgcggtacctatgcgcgtaagtggaccctgaaaggcaagcagaccaaagcgaccctggacaagctgaccgcgacccaaaccgtggcgctggttgcgatcgatctgggtcagaccaacccgatcagcgcgggcattagccgtgtgacccaagagaacggtgcgctgcagtgcgaaccgctggaccgtttcaccctgccggacgatctgctgaaagacatcagcgcgtaccgtattgcgtgggatcgtaacgaagaggaactgcgtgcgcgtagcgttgaggcgctgccggaagcgcagcaagcggaagtgcgtgcgctggatggtgttagcaaggaaaccgcgcgtacccaactgtgcgcggacttcggtctggacccgaaacgtctgccgtgggacaagatgagcagcaacaccacctttatcagcgaggcgctgctgagcaacagcgtgagccgtgatcaggttttctttaccccggcgccgaagaaaggtgcgaagaaaaaggcgccggtggaagttatgcgtaaagaccgtacctgggcgcgtgcgtataagccgcgtctgagcgtggaggcgcagaaactgaagaacgaagcgctgtgggcgctgaaacgtaccagcccggagtacctgaaactgagccgtcgtaaagaggagctgtgccgtcgtagcatcaactatgtgattgagaagacccgtcgtcgtacccagtgccaaatcgtgattccggttattgaagacctgaacgttcgtttctttcacggtagcggcaaacgtctgccgggttgggataacttctttaccgcgaaaaaggaaaaccgttggttcatccaaggcctgcacaaggcgtttagcgacctgcgtacccaccgtagcttctacgtgtttgaggttcgtccggaacgtaccagcattacctgcccgaaatgcggtcactgcgaggttggtaaccgtgatggcgaagcgttccagtgcctgagctgcggcaagacctgcaacgcggacctggatgtggcgacccacaacctgacccaagttgcgctgaccggcaaaaccatgccgaagcgtgaggaaccgcgtgacgcgcagggtaccgcgccggcgcgtaaaaccaaaaaggcgagcaaaagcaaggctccgccggcggagcgtgaagatcaaaccccggcgcaagagccgagccagaccagctaaggtacccttgaggtgctgtttcagggaccaggaggtagtggatctgcttggagccatccacagttcgaaaaaggtggaggttctggcggtggatcaggtggaagtgcatggtctcaccctcagtttgagaaataaggatccggctgctaacaaagcccgaaaggaagctgagttggctgctgccaccgctgagcaataactagcataaccccttggggcctctaaacgggtcttgaggggttttttgctgaaaggaggaactatatccggatatcccgcaagaggcccggcagtaccggcataaccaagcctatgcctacagcatccagggtgacggtgccgaggatgacgatgagcgcattgttagatttcatacacggtgcctgactgcgttagcaatttaactgtgataaactaccgcattaaagcttatcgatgataagctgtcaaacatgagaattcttgaagacgaaagggcctcgtgatacgcctatttttataggttaatgtcatgataataatggtttcttagacgtcaggtggcacttttcggggaaatgtgcgcggaacccctatttgtttatttttctaaatacattcaaatatgtatccgctcatgagacaataaccctgataaatgcttcaataatattgaaaaaggaagagtatgagtattcaacatttccgtgtcgcccttattcccttttttgcggcattttgccttcctgtttttgctcacccagaaacgctggtgaaagtaaaagatgctgaagatcagttgggtgcacgagtgggttacatcgaactggatctcaacagcggtaagatccttgagagttttcgccccgaagaacgttttccaatgatgagcacttttaaagttctgctatgtggcgcggtattatcccgtgttgacgccgggcaagagcaactcggtcgccgcatacactattctcagaatgacttggttgagtactcaccagtcacagaaaagcatcttacggatggcatgacagtaagagaattatgcagtgctgccataaccatgagtgataacactgcggccaacttacttctgacaacgatcggaggaccgaaggagctaaccgcttttttgcacaacatgggggatcatgtaactcgccttgatcgttgggaaccggagctgaatgaagccataccaaacgacgagcgtgacaccacgatgcctgcagcaatggcaacaacgttgcgcaaactattaactggcgaactacttactctagcttcccggcaacaattaatagactggatggaggcggataaagttgcaggaccacttctgcgctcggcccttccggctggctggtttattgctgataaatctggagccggtgagcgtgggtctcgcggtatcattgcagcactggggccagatggtaagccctcccgtatcgtagttatctacacgacggggagtcaggcaactatggatgaacgaaatagacagatcgctgagataggtgcctcactgattaagcattggtaactgtcagaccaagtttactcatatatactttagattgatttaaaacttcatttttaatttaaaaggatctaggtgaagatcctttttgataatctcatgaccaaaatcccttaacgtgagttttcgttccactgagcgtcagaccccgtagaaaagatcaaaggatcttcttgagatcctttttttctgcgcgtaatctgctgcttgcaaacaaaaaaaccaccgctaccagcggtggtttgtttgccggatcaagagctaccaactctttttccgaaggtaactggcttcagcagagcgcagataccaaatactgtccttctagtgtagccgtagttaggccaccacttcaagaactctgtagcaccgcctacatacctcgctctgctaatcctgttaccagtggctgctgccagtggcgataagtcgtgtcttaccgggttggactcaagacgatagttaccggataaggcgcagcggtcgggctgaacggggggttcgtgcacacagcccagcttggagcgaacgacctacaccgaactgagatacctacagcgtgagctatgagaaagcgccacgcttcccgaagggagaaaggcggacaggtatccggtaagcggcagggtcggaacaggagagcgcacgagggagcttccagggggaaacgcctggtatctttatagtcctgtcgggtttcgccacctctgacttgagcgtcgatttttgtgatgctcgtcaggggggcggagcctatggaaaaacgccagcaacgcggcctttttacggttcctggccttttgctggccttttgctcacatgttctttcctgcgttatcccctgattctgtggataaccgtattaccgcctttgagtgagctgataccgctcgccgcagccgaacgaccgagcgcagcgagtcagtgagcgaggaagcggaagagcgcctgatgcggtattttctccttacgcatctgtgcggtatttcacaccgcatatatggtgcactctcagtacaatctgctctgatgccgcatagttaagccagtatacactccgctatcgctacgtgactgggtcatggctgcgccccgacacccgccaacacccgctgacgcgccctgacgggcttgtctgctcccggcatccgcttacagacaagctgtgaccgtctccgggagctgcatgtgtcagaggttttcaccgtcatcaccgaaacgcgcgaggcagctgcggtaaagctcatcagcgtggtcgtgaagcgattcacagatgtctgcctgttcatccgcgtccagctcgttgagtttctccagaagcgttaatgtctggcttctgataaagcgggccatgttaagggcggttttttcctgtttggtcactgatgcctccgtgtaagggggatttctgttcatgggggtaatgataccgatgaaacgagagaggatgctcacgatacgggttactgatgatgaacatgcccggttactggaacgttgtgagggtaaacaactggcggtatggatgcggcgggaccagagaaaaatcactcagggtcaatgccagcgcttcgttaatacagatgtaggtgttccacagggtagccagcagcatcctgcgatgcagatccggaacataatggtgcagggcgctgacttccgcgtttccagactttacgaaacacggaaaccgaagaccattcatgttgttgctcaggtcgcagacgttttgcagcagcagtcgcttcacgttcgctcgcgtatcggtgattcattctgctaaccagtaaggcaaccccgccagcctagccgggtcctcaacgacaggagcacgatcatgcgcacccgtggccaggacccaacgctgcccgagatgcgccgcgtgcggctgctggagatggcggacgcgatggatatgttctgccaagggttggtttgcgcattcacagttctccgcaagaattgattggctccaattcttggagtggtgaatccgttagcgaggtgccgccggcttccattcaggtcgaggtggcccggctccatgcaccgcgacgcaacgcggggaggcagacaaggtatagggcggcgcctacaatccatgccaacccgttccatgtgctcgccgaggcggcataaatcgccgtgacgatcagcggtccagtgatcgaagttaggctggtaagagccgcgagcgatccttgaagctgtccctgatggtcgtcatctacctgcctggacagcatggcctgcaacgcgggcatcccgatgccgccggaagcgagaagaatcataatggggaaggccatccagcctcgcgtcgcgaacgccagcaagacgtagcccagcgcgtcggccgccatgccggcgataatggcctgcttctcgccgaaacgtttggtggcgggaccagtgacgaaggcttgagcgagggcgtgcaagattccgaataccgcaagcgacaggccgatcatcgtcgcgctccagcgaaagcggtcctcgccgaaaatgacccagagcgctgccggcacctgtcctacgagttgcatgataaagaagacagtcataagtgcggcgacgatagtcatgccccgcgcccaccggaaggagctgactgggttgaaggctctcaagggcatcggtcgagatcccggtgcctaatgagtgagctaacttacattaattgcgttgcgctcactgcccgctttccagtcgggaaacctgtcgtgccagctgcattaatgaatcggccaacgcgcggggagaggcggtttgcgtattgggcgccagggtggtttttcttttcaccagtgagacgggcaacagctgattgcccttcaccgcctggccctgagagagttgcagcaagcggtccacgctggtttgccccagcaggcgaaaatcctgtttgatggtggttaacggcgggatataacatgagctgtcttcggtatcgtcgtatcccactaccgagatatccgcaccaacgcgcagcccggactcggtaatggcgcgcattgcgcccagcgccatctgatcgttggcaaccagcatcgcagtgggaacgatgccctcattcagcatttgcatggtttgttgaaaaccggacatggcactccagtcgccttcccgttccgctatcggctgaatttgattgcgagtgagatatttatgccagccagccagacgcagacgcgccgagacagaacttaatgggcccgctaacagcgcgatttgctggtgacccaatgcgaccagatgctccacgcccagtcgcgtaccgtcttcatgggagaaaataatactgttgatgggtgtc

SEQ ID NO: 276 - protein, 20 aa, Serratia entomophila
MPYSSESAEAETHSAETERD

SEQ ID NO: 277 - DNA, 8110 bp, Serratia entomophila
  source 1..8110: mol_type = other DNA; note = 21_seafp18n20ktta-casphi2-pet11a_U9784IC070-21
  CDS 933..992: note = SEAfp18N20KTtA; protein_id = 278; translation = MPYSSESAEAEAHSAEAERD
  CDS 993..3266: note = Casphi2; protein_id = 282; translation = MPKPAVESEFSKVLKKHFPGERFRSSYMKRGGKILAAQGEEAVVAY LQGKSEEEPPNFQPPAKCHVVTKSRDFAEWPIMKASEAIQRYIYALSTTERAACKPGKS SESHAAWFAATGVSNHGYSHVQGLNLIFDHTLGRYDGVLKKVQLRNEKARARLESINAS RADEGLPEIKAEEEEVATNETGHLLQPPGINPSFYVYQTISPQAYRPRDEIVLPPEYAG YVRDPNAPIPLGVVRNRCDIQKGCPGYIPEWQREAGTAISPKTGKAVTVPGLSPKKNKR MRRYWRSEKEKAQDALLVTVRIGTDWVVIDVRGLLRNARWRTIAPKDISLNALLDLFTG DPVIDVRRNIVTFTYTLDACGTYARKWTLKGKQTKATLDKLTATQTVALVAIDLGQTNP ISAGISRVTQENGALQCEPLDRFTLPDDLLKDISAYRIAWDRNEEELRARSVEALPEAQ QAEVRALDGVSKETARTQLCADFGLDPKRLPWDKMSSNTTFISEALLSNSVSRDQVFFT PAPKKGAKKKAPVEVMRKDRTWARAYKPRLSVEAQKLKNEALWALKRTSPEYLKLSRRK EELCRRSINYVIEKTRRRTQCQIVIPVIEDLNVRFFHGSGKRLPGWDNFFTAKKENRWF IQGLHKAFSDLRTHRSFYVFEVRPERTSITCPKCGHCEVGNRDGEAFQCLSCGKTCNAD LDVATHNLTQVALTGKTMPKREEPRDAQGTAPARKTKKASKSKAPPAEREDQTPAQEPS QTS
tggtcagagacatcaagaaataacgccggaacattagtgcaggcagcttccacagcaatggcatcctggtcatccagcggatagttaatgatcagcccactgacgcgttgcgcgagaagattgtgcaccgccgctttacaggcttcgacgccgcttcgttctaccatcgacaccaccacgctggcacccagttgatcggcgcgagatttaatcgccgcgacaatttgcgacggcgcgtgcagggccagactggaggtggcaacgccaatcagcaacgactgtttgcccgccagttgttgtgccacgcggttgggaatgtaattcagctccgccatcgccgcttccactttttcccgcgttttcgcagaaacgtggctggcctggttcaccacgcgggaaacggtctgataagagacaccggcatactctgcgacatcgtataacgttactggtttcacattcaccaccctgaattgactctcttccgggcgctatcatgccataccgcgaaaggttttgcgccattcgatggtgtccgggatctcgacgctctcccttatgcgactcctgcattaggaagcagcccagtagtaggttgaggccgttgagcaccgccgccgcaaggaatggtgcatgcaaggagatggcgcccaacagtcccccggccacggggcctgccaccatacccacgccgaaacaagcgctcatgagcccgaagtggcgagcccgatcttccccatcggtgatgtcggcgatataggcgccagcaaccgcacctgtggcgccggtgatgccggccacgatgcgtccggcgtagaggatcgagatctcgatcccgcgaaattaatacgactcactataggggaattgtgagcggataacaattcccctctagaaataattttgtttaactttaagaaggagatatacatatgccgtatagcagcgaaagcgcggaagcggaagcgcatagcgcggaagcggaacgcgatatgccgaaaccggcggtggagagcgagttcagcaaggttctgaagaaacacttcccgggcgagcgttttcgtagcagctacatgaaacgtggtggcaagatcctggcggcgcaaggcgaggaagcggtggttgcgtatctgcagggcaaaagcgaggaagagccgccgaacttccaaccgccggcgaaatgccacgtggttaccaagagccgtgactttgcggagtggccgattatgaaggcgagcgaagcgatccagcgttacatttatgcgctgagcaccaccgagcgtgcggcgtgcaaaccgggcaagagcagcgaaagccatgcggcgtggtttgcggcgaccggcgtgagcaaccacggctacagccacgttcaaggcctgaacctgatctttgaccacaccctgggtcgttatgatggcgtgctgaagaaagttcagctgcgtaacgagaaagcgcgtgcgcgtctggaaagcatcaacgcgagccgtgcggatgagggtctgccggaaattaaggcggaagaggaagaggtggcgaccaacgaaaccggccacctgctgcagccgccgggtatcaacccgagcttttacgtttatcaaaccattagcccgcaggcgtaccgtccgcgtgacgagattgtgctgccgccggaatacgcgggttatgttcgtgatccgaacgcgccgattccgctgggcgtggttcgtaaccgttgcgacatccaaaaaggttgcccgggctacattccggagtggcagcgtgaagcgggtaccgcgatcagcccgaaaaccggcaaggcggtgaccgttccgggtctgagcccgaagaaaaacaagcgtatgcgtcgttattggcgtagcgagaaagaaaaggcgcaagatgcgctgctggtgaccgttcgtatcggtaccgactgggtggttattgatgttcgtggcctgctgcgtaacgcgcgttggcgtaccatcgcgccgaaagacattagcctgaacgcgctgctggacctgttcaccggcgacccggtgatcgatgttcgtcgtaacattgttacctttacctacaccctggacgcgtgcggtacctatgcgcgtaagtggaccctgaaaggcaagcagaccaaagcgaccctggacaagctgaccgcgacccaaaccgtggcgctggttgcgatcgatctgggtcagaccaacccgatcagcgcgggcattagccgtgtgacccaagagaacggtgcgctgcagtgcgaaccgctggaccgtttcaccctgccggacgatctgctgaaagacatcagcgcgtaccgtattgcgtgggatcgtaacgaagaggaactgcgtgcgcgtagcgttgaggcgctgccggaagcgcagcaagcggaagtgcgtgcgctggatggtgttagcaaggaaaccgcgcgtacccaactgtgcgcggacttcggtctggacccgaaacgtctgccgtgggacaagatgagcagcaacaccacctttatcagcgaggcgctgctgagcaacagcgtgagccgtgatcaggttttctttaccccggcgccgaagaaaggtgcgaagaaaaaggcgccggtggaagttatgcgtaaagaccgtacctgggcgcgtgcgtataagccgcgtctgagcgtggaggcgcagaaactgaagaacgaagcgctgtgggcgctgaaacgtaccagcccggagtacctgaaactgagccgtcgtaaagaggagctgtgccgtcgtagcatcaactatgtgattgagaagacccgtcgtcgtacccagtgccaaatcgtgattccggttattgaagacctgaacgttcgtttctttcacggtagcggcaaacgtctgccgggttgggataacttctttaccgcgaaaaaggaaaaccgttggttcatccaaggcctgcacaaggcgtttagcgacctgcgtacccaccgtagcttctacgtgtttgaggttcgtccggaacgtaccagcattacctgcccgaaatgcggtcactgcgaggttggtaaccgtgatggcgaagcgttccagtgcctgagctgcggcaagacctgcaacgcggacctggatgtggcgacccacaacctgacccaagttgcgctgaccggcaaaaccatgccgaagcgtgaggaaccgcgtgacgcgcagggtaccgcgccggcgcgtaaaaccaaaaaggcgagcaaaagcaaggctccgccggcggagcgtgaagatcaaaccccggcgcaagagccgagccagaccagctaaggtacccttgaggtgctgtttcagggaccaggaggtagtggatctgcttggagccatccacagttcgaaaaaggtggaggttctggcggtggatcaggtggaagtgcatggtctcaccctcagtttgagaaataaggatccggctgctaacaaagcccgaaaggaagctgagttggctgctgccaccgctgagcaataactagcataaccccttggggcctctaaacgggtcttgaggggttttttgctgaaaggaggaactatatccggatatcccgcaagaggcccggcagtaccggcataaccaagcctatgcctacagcatccagggtgacggtgccgaggatgacgatgagcgcattgttagatttcatacacggtgcctgactgcgttagcaatttaactgtgataaactaccgcattaaagcttatcgatgataagctgtcaaacatgagaattcttgaagacgaaagggcctcgtgatacgcctatttttataggttaatgtcatgataataatggtttcttagacgtcaggtggcacttttcggggaaatgtgcgcggaacccctatttgtttatttttctaaatacattcaaatatgtatccgctcatgagacaataaccctgataaatgcttcaataatattgaaaaaggaagagtatgagtattcaacatttccgtgtcgcccttattcccttttttgcggcattttgccttcctgtttttgctcacccagaaacgctggtgaaagtaaaagatgctgaagatcagttgggtgcacgagtgggttacatcgaactggatctcaacagcggtaagatccttgagagttttcgccccgaagaacgttttccaatgatgagcacttttaaagttctgctatgtggcgcggtattatcccgtgttgacgccgggcaagagcaactcggtcgccgcatacactattctcagaatgacttggttgagtactcaccagtcacagaaaagcatcttacggatggcatgacagtaagagaattatgcagtgctgccataaccatgagtgataacactgcggccaacttacttctgacaacgatcggaggaccgaaggagctaaccgcttttttgcacaacatgggggatcatgtaactcgccttgatcgttgggaaccggagctgaatgaagccataccaaacgacgagcgtgacaccacgatgcctgcagcaatggcaacaacgttgcgcaaactattaactggcgaactacttactctagcttcccggcaacaattaatagactggatggaggcggataaagttgcaggaccacttctgcgctcggcccttccggctggctggtttattgctgataaatctggagccggtgagcgtgggtctcgcggtatcattgcagcactggggccagatggtaagccctcccgtatcgtagttatctacacgacggggagtcaggcaactatggatgaacgaaatagacagatcgctgagataggtgcctcactgattaagcattggtaactgtcagaccaagtttactcatatatactttagattgatttaaaacttcatttttaatttaaaaggatctaggtgaagatcctttttgataatctcatgaccaaaatcccttaacgtgagttttcgttccactgagcgtcagaccccgtagaaaagatcaaaggatcttcttgagatcctttttttctgcgcgtaatctgctgcttgcaaacaaaaaaaccaccgctaccagcggtggtttgtttgccggatcaagagctaccaactctttttccgaaggtaactggcttcagcagagcgcagataccaaatactgtccttctagtgtagccgtagttaggccaccacttcaagaactctgtagcaccgcctacatacctcgctctgctaatcctgttaccagtggctgctgccagtggcgataagtcgtgtcttaccgggttggactcaagacgatagttaccggataaggcgcagcggtcgggctgaacggggggttcgtgcacacagcccagcttggagcgaacgacctacaccgaactgagatacctacagcgtgagctatgagaaagcgccacgcttcccgaagggagaaaggcggacaggtatccggtaagcggcagggtcggaacaggagagcgcacgagggagcttccagggggaaacgcctggtatctttatagtcctgtcgggtttcgccacctctgacttgagcgtcgatttttgtgatgctcgtcaggggggcggagcctatggaaaaacgccagcaacgcggcctttttacggttcctggccttttgctggccttttgctcacatgttctttcctgcgttatcccctgattctgtggataaccgtattaccgcctttgagtgagctgataccgctcgccgcagccgaacgaccgagcgcagcgagtcagtgagcgaggaagcggaagagcgcctgatgcggtattttctccttacgcatctgtgcggtatttcacaccgcatatatggtgcactctcagtacaatctgctctgatgccgcatagttaagccagtatacactccgctatcgctacgtgactgggtcatggctgcgccccgacacccgccaacacccgctgacgcgccctgacgggcttgtctgctcccggcatccgcttacagacaagctgtgaccgtctccgggagctgcatgtgtcagaggttttcaccgtcatcaccgaaacgcgcgaggcagctgcggtaaagctcatcagcgtggtcgtgaagcgattcacagatgtctgcctgttcatccgcgtccagctcgttgagtttctccagaagcgttaatgtctggcttctgataaagcgggccatgttaagggcggttttttcctgtttggtcactgatgcctccgtgtaagggggatttctgttcatgggggtaatgataccgatgaaacgagagaggatgctcacgatacgggttactgatgatgaacatgcccggttactggaacgttgtgagggtaaacaactggcggtatggatgcggcgggaccagagaaaaatcactcagggtcaatgccagcgcttcgttaatacagatgtaggtgttccacagggtagccagcagcatcctgcgatgcagatccggaacataatggtgcagggcgctgacttccgcgtttccagactttacgaaacacggaaaccgaagaccattcatgttgttgctcaggtcgcagacgttttgcagcagcagtcgcttcacgttcgctcgcgtatcggtgattcattctgctaaccagtaaggcaaccccgccagcctagccgggtcctcaacgacaggagcacgatcatgcgcacccgtggccaggacccaacgctgcccgagatgcgccgcgtgcggctgctggagatggcggacgcgatggatatgttctgccaagggttggtttgcgcattcacagttctccgcaagaattgattggctccaattcttggagtggtgaatccgttagcgaggtgccgccggcttccattcaggtcgaggtggcccggctccatgcaccgcgacgcaacgcggggaggcagacaaggtatagggcggcgcctacaatccatgccaacccgttccatgtgctcgccgaggcggcataaatcgccgtgacgatcagcggtccagtgatcgaagttaggctggtaagagccgcgagcgatccttgaagctgtccctgatggtcgtcatctacctgcctggacagcatggcctgcaacgcgggcatcccgatgccgccggaagcgagaagaatcataatggggaaggccatccagcctcgcgtcgcgaacgccagcaagacgtagcccagcgcgtcggccgccatgccggcgataatggcctgcttctcgccgaaacgtttggtggcgggaccagtgacgaaggcttgagcgagggcgtgcaagattccgaataccgcaagcgacaggccgatcatcgtcgcgctccagcgaaagcggtcctcgccgaaaatgacccagagcgctgccggcacctgtcctacgagttgcatgataaagaagacagtcataagtgcggcgacgatagtcatgccccgcgcccaccggaaggagctgactgggttgaaggctctcaagggcatcggtcgagatcccggtgcctaatgagtgagctaacttacattaattgcgttgcgctcactgcccgctttccagtcgggaaacctgtcgtgccagctgcattaatgaatcggccaacgcgcggggagaggcggtttgcgtattgggcgccagggtggtttttcttttcaccagtgagacgggcaacagctgattgcccttcaccgcctggccctgagagagttgcagcaagcggtccacgctggtttgccccagcaggcgaaaatcctgtttgatggtggttaacggcgggatataacatgagctgtcttcggtatcgtcgtatcccactaccgagatatccgcaccaacgcgcagcccggactcggtaatggcgcgcattgcgcccagcgccatctgatcgttggcaaccagcatcgcagtgggaacgatgccctcattcagcatttgcatggtttgttgaaaaccggacatggcactccagtcgccttcccgttccgctatcggctgaatttgattgcgagtgagatatttatgccagccagccagacgcagacgcgccgagacagaacttaatgggcccgctaacagcgcgatttgctggtgacccaatgcgaccagatgctccacgcccagtcgcgtaccgtcttcatgggagaaaataatactgttgatgggtgtc

SEQ ID NO: 278 - protein, 20 aa, Serratia entomophila
MPYSSESAEAEAHSAEAERD

SEQ ID NO: 279 - DNA, 8110 bp, Serratia entomophila
  source 1..8110: mol_type = other DNA; note = 23_seafp18nt20etoa-cashi2_U9784IC070-23
  CDS 933..992: note = SEAfp18N20EtA; protein_id = 280; translation = MPYSSASKAKATHSKATARD
  CDS 993..3266: note = Casphi2; protein_id = 283; translation = MPKPAVESEFSKVLKKHFPGERFRSSYMKRGGKILAAQGEEAVVAY LQGKSEEEPPNFQPPAKCHVVTKSRDFAEWPIMKASEAIQRYIYALSTTERAACKPGKS SESHAAWFAATGVSNHGYSHVQGLNLIFDHTLGRYDGVLKKVQLRNEKARARLESINAS RADEGLPEIKAEEEEVATNETGHLLQPPGINPSFYVYQTISPQAYRPRDEIVLPPEYAG YVRDPNAPIPLGVVRNRCDIQKGCPGYIPEWQREAGTAISPKTGKAVTVPGLSPKKNKR MRRYWRSEKEKAQDALLVTVRIGTDWVVIDVRGLLRNARWRTIAPKDISLNALLDLFTG DPVIDVRRNIVTFTYTLDACGTYARKWTLKGKQTKATLDKLTATQTVALVAIDLGQTNP ISAGISRVTQENGALQCEPLDRFTLPDDLLKDISAYRIAWDRNEEELRARSVEALPEAQ QAEVRALDGVSKETARTQLCADFGLDPKRLPWDKMSSNTTFISEALLSNSVSRDQVFFT PAPKKGAKKKAPVEVMRKDRTWARAYKPRLSVEAQKLKNEALWALKRTSPEYLKLSRRK EELCRRSINYVIEKTRRRTQCQIVIPVIEDLNVRFFHGSGKRLPGWDNFFTAKKENRWF IQGLHKAFSDLRTHRSFYVFEVRPERTSITCPKCGHCEVGNRDGEAFQCLSCGKTCNAD LDVATHNLTQVALTGKTMPKREEPRDAQGTAPARKTKKASKSKAPPAEREDQTPAQEPS QTS
tggtcagagacatcaagaaataacgccggaacattagtgcaggcagcttccacagcaatggcatcctggtcatccagcggatagttaatgatcagcccactgacgcgttgcgcgagaagattgtgcaccgccgctttacaggcttcgacgccgcttcgttctaccatcgacaccaccacgctggcacccagttgatcggcgcgagatttaatcgccgcgacaatttgcgacggcgcgtgcagggccagactggaggtggcaacgccaatcagcaacgactgtttgcccgccagttgttgtgccacgcggttgggaatgtaattcagctccgccatcgccgcttccactttttcccgcgttttcgcagaaacgtggctggcctggttcaccacgcgggaaacggtctgataagagacaccggcatactctgcgacatcgtataacgttactggtttcacattcaccaccctgaattgactctcttccgggcgctatcatgccataccgcgaaaggttttgcgccattcgatggtgtccgggatctcgacgctctcccttatgcgactcctgcattaggaagcagcccagtagtaggttgaggccgttgagcaccgccgccgcaaggaatggtgcatgcaaggagatggcgcccaacagtcccccggccacggggcctgccaccatacccacgccgaaacaagcgctcatgagcccgaagtggcgagcccgatcttccccatcggtgatgtcggcgatataggcgccagcaaccgcacctgtggcgccggtgatgccggccacgatgcgtccggcgtagaggatcgagatctcgatcccgcgaaattaatacgactcactataggggaattgtgagcggataacaattcccctctagaaataattttgtttaactttaagaaggagatatacatatgccgtatagcagcgcgagcaaagcgaaagcgacccatagcaaagcgaccgcgcgcgatatgccgaaaccggcggtggagagcgagttcagcaaggttctgaagaaacacttcccgggcgagcgttttcgtagcagctacatgaaacgtggtggcaagatcctggcggcgcaaggcgaggaagcggtggttgcgtatctgcagggcaaaagcgaggaagagccgccgaacttccaaccgccggcgaaatgccacgtggttaccaagagccgtgactttgcggagtggccgattatgaaggcgagcgaagcgatccagcgttacatttatgcgctgagcaccaccgagcgtgcggcgtgcaaaccgggcaagagcagcgaaagccatgcggcgtggtttgcggcgaccggcgtgagcaaccacggctacagccacgttcaaggcctgaacctgatctttgaccacaccctgggtcgttatgatggcgtgctgaagaaagttcagctgcgtaacgagaaagcgcgtgcgcgtctggaaagcatcaacgcgagccgtgcggatgagggtctgccggaaattaaggcggaagaggaagaggtggcgaccaacgaaaccggccacctgctgcagccgccgggtatcaacccgagcttttacgtttatcaaaccattagcccgcaggcgtaccgtccgcgtgacgagattgtgctgccgccggaatacgcgggttatgttcgtgatccgaacgcgccgattccgctgggcgtggttcgtaaccgttgcgacatccaaaaaggttgcccgggctacattccggagtggcagcgtgaagcgggtaccgcgatcagcccgaaaaccggcaaggcggtgaccgttccgggtctgagcccgaagaaaaacaagcgtatgcgtcgttattggcgtagcgagaaagaaaaggcgcaagatgcgctgctggtgaccgttcgtatcggtaccgactgggtggttattgatgttcgtggcctgctgcgtaacgcgcgttggcgtaccatcgcgccgaaagacattagcctgaacgcgctgctggacctgttcaccggcgacccggtgatcgatgttcgtcgtaacattgttacctttacctacaccctggacgcgtgcggtacctatgcgcgtaagtggaccctgaaaggcaagcagaccaaagcgaccctggacaagctgaccgcgacccaaaccgtggcgctggttgcgatcgatctgggtcagaccaacccgatcagcgcgggcattagccgtgtgacccaagagaacggtgcgctgcagtgcgaaccgctggaccgtttcaccctgccggacgatctgctgaaagacatcagcgcgtaccgtattgcgtgggatcgtaacgaagaggaactgcgtgcgcgtagcgttgaggcgctgccggaagcgcagcaagcggaagtgcgtgcgctggatggtgttagcaaggaaaccgcgcgtacccaactgtgcgcggacttcggtctggacccgaaacgtctgccgtgggacaagatgagcagcaacaccacctttatcagcgaggcgctgctgagcaacagcgtgagccgtgatcaggttttctttaccccggcgccgaagaaaggtgcgaagaaaaaggcgccggtggaagttatgcgtaaagaccgtacctgggcgcgtgcgtataagccgcgtctgagcgtggaggcgcagaaactgaagaacgaagcgctgtgggcgctgaaacgtaccagcccggagtacctgaaactgagccgtcgtaaagaggagctgtgccgtcgtagcatcaactatgtgattgagaagacccgtcgtcgtacccagtgccaaatcgtgattccggttattgaagacctgaacgttcgtttctttcacggtagcggcaaacgtctgccgggttgggataacttctttaccgcgaaaaaggaaaaccgttggttcatccaaggcctgcacaaggcgtttagcgacctgcgtacccaccgtagcttctacgtgtttgaggttcgtccggaacgtaccagcattacctgcccgaaatgcggtcactgcgaggttggtaaccgtgatggcgaagcgttccagtgcctgagctgcggcaagacctgcaacgcggacctggatgtggcgacccacaacctgacccaagttgcgctgaccggcaaaaccatgccgaagcgtgaggaaccgcgtgacgcgcagggtaccgcgccggcgcgtaaaaccaaaaaggcgagcaaaagcaaggctccgccggcggagcgtgaagatcaaaccccggcgcaagagccgagccagaccagctaaggtacccttgaggtgctgtttcagggaccaggaggtagtggatctgcttggagccatccacagttcgaaaaaggtggaggttctggcggtggatcaggtggaagtgcatggtctcaccctcagtttgagaaataaggatccggctgctaacaaagcccgaaaggaagctgagttggctgctgccaccgctgagcaataactagcataaccccttggggcctctaaacgggtcttgaggggttttttgctgaaaggaggaactatatccggatatcccgcaagaggcccggcagtaccggcataaccaagcctatgcctacagcatccagggtgacggtgccgaggatgacgatgagcgcattgttagatttcatacacggtgcctgactgcgttagcaatttaactgtgataaactaccgcattaaagcttatcgatgataagctgtcaaacatgagaattcttgaagacgaaagggcctcgtgatacgcctatttttataggttaatgtcatgataataatggtttcttagacgtcaggtggcacttttcggggaaatgtgcgcggaacccctatttgtttatttttctaaatacattcaaatatgtatccgctcatgagacaataaccctgataaatgcttcaataatattgaaaaaggaagagtatgagtattcaacatttccgtgtcgcccttattcccttttttgcggcattttgccttcctgtttttgctcacccagaaacgctggtgaaagtaaaagatgctgaagatcagttgggtgcacgagtgggttacatcgaactggatctcaacagcggtaagatccttgagagttttcgccccgaagaacgttttccaatgatgagcacttttaaagttctgctatgtggcgcggtattatcccgtgttgacgccgggcaagagcaactcggtcgccgcatacactattctcagaatgacttggttgagtactcaccagtcacagaaaagcatcttacggatggcatgacagtaagagaattatgcagtgctgccataaccatgagtgataacactgcggccaacttacttctgacaacgatcggaggaccgaaggagctaaccgcttttttgcacaacatgggggatcatgtaactcgccttgatcgttgggaaccggagctgaatgaagccataccaaacgacgagcgtgacaccacgatgcctgcagcaatggcaacaacgttgcgcaaactattaactggcgaactacttactctagcttcccggcaacaattaatagactggatggaggcggataaagttgcaggaccacttctgcgctcggcccttccggctggctggtttattgctgataaatctggagccggtgagcgtgggtctcgcggtatcattgcagcactggggccagatggtaagccctcccgtatcgtagttatctacacgacggggagtcaggcaactatggatgaacgaaatagacagatcgctgagataggtgcctcactgattaagcattggtaactgtcagaccaagtttactcatatatactttagattgatttaaaacttcatttttaatttaaaaggatctaggtgaagatcctttttgataatctcatgaccaaaatcccttaacgtgagttttcgttccactgagcgtcagaccccgtagaaaagatcaaaggatcttcttgagatcctttttttctgcgcgtaatctgctgcttgcaaacaaaaaaaccaccgctaccagcggtggtttgtttgccggatcaagagctaccaactctttttccgaaggtaactggcttcagcagagcgcagataccaaatactgtccttctagtgtagccgtagttaggccaccacttcaagaactctgtagcaccgcctacatacctcgctctgctaatcctgttaccagtggctgctgccagtggcgataagtcgtgtcttaccgggttggactcaagacgatagttaccggataaggcgcagcggtcgggctgaacggggggttcgtgcacacagcccagcttggagcgaacgacctacaccgaactgagatacctacagcgtgagctatgagaaagcgccacgcttcccgaagggagaaaggcggacaggtatccggtaagcggcagggtcggaacaggagagcgcacgagggagcttccagggggaaacgcctggtatctttatagtcctgtcgggtttcgccacctctgacttgagcgtcgatttttgtgatgctcgtcaggggggcggagcctatggaaaaacgccagcaacgcggcctttttacggttcctggccttttgctggccttttgctcacatgttctttcctgcgttatcccctgattctgtggataaccgtattaccgcctttgagtgagctgataccgctcgccgcagccgaacgaccgagcgcagcgagtcagtgagcgaggaagcggaagagcgcctgatgcggtattttctccttacgcatctgtgcggtatttcacaccgcatatatggtgcactctcagtacaatctgctctgatgccgcatagttaagccagtatacactccgctatcgctacgtgactgggtcatggctgcgccccgacacccgccaacacccgctgacgcgccctgacgggcttgtctgctcccggcatccgcttacagacaagctgtgaccgtctccgggagctgcatgtgtcagaggttttcaccgtcatcaccgaaacgcgcgaggcagctgcggtaaagctcatcagcgtggtcgtgaagcgattcacagatgtctgcctgttcatccgcgtccagctcgttgagtttctccagaagcgttaatgtctggcttctgataaagcgggccatgttaagggcggttttttcctgtttggtcactgatgcctccgtgtaagggggatttctgttcatgggggtaatgataccgatgaaacgagagaggatgctcacgatacgggttactgatgatgaacatgcccggttactggaacgttgtgagggtaaacaactggcggtatggatgcggcgggaccagagaaaaatcactcagggtcaatgccagcgcttcgttaatacagatgtaggtgttccacagggtagccagcagcatcctgcgatgcagatccggaacataatggtgcagggcgctgacttccgcgtttccagactttacgaaacacggaaaccgaagaccattcatgttgttgctcaggtcgcagacgttttgcagcagcagtcgcttcacgttcgctcgcgtatcggtgattcattctgctaaccagtaaggcaaccccgccagcctagccgggtcctcaacgacaggagcacgatcatgcgcacccgtggccaggacccaacgctgcccgagatgcgccgcgtgcggctgctggagatggcggacgcgatggatatgttctgccaagggttggtttgcgcattcacagttctccgcaagaattgattggctccaattcttggagtggtgaatccgttagcgaggtgccgccggcttccattcaggtcgaggtggcccggctccatgcaccgcgacgcaacgcggggaggcagacaaggtatagggcggcgcctacaatccatgccaacccgttccatgtgctcgccgaggcggcataaatcgccgtgacgatcagcggtccagtgatcgaagttaggctggtaagagccgcgagcgatccttgaagctgtccctgatggtcgtcatctacctgcctggacagcatggcctgcaacgcgggcatcccgatgccgccggaagcgagaagaatcataatggggaaggccatccagcctcgcgtcgcgaacgccagcaagacgtagcccagcgcgtcggccgccatgccggcgataatggcctgcttctcgccgaaacgtttggtggcgggaccagtgacgaaggcttgagcgagggcgtgcaagattccgaataccgcaagcgacaggccgatcatcgtcgcgctccagcgaaagcggtcctcgccgaaaatgacccagagcgctgccggcacctgtcctacgagttgcatgataaagaagacagtcataagtgcggcgacgatagtcatgccccgcgcccaccggaaggagctgactgggttgaaggctctcaagggcatcggtcgagatcccggtgcctaatgagtgagctaacttacattaattgcgttgcgctcactgcccgctttccagtcgggaaacctgtcgtgccagctgcattaatgaatcggccaacgcgcggggagaggcggtttgcgtattgggcgccagggtggtttttcttttcaccagtgagacgggcaacagctgattgcccttcaccgcctggccctgagagagttgcagcaagcggtccacgctggtttgccccagcaggcgaaaatcctgtttgatggtggttaacggcgggatataacatgagctgtcttcggtatcgtcgtatcccactaccgagatatccgcaccaacgcgcagcccggactcggtaatggcgcgcattgcgcccagcgccatctgatcgttggcaaccagcatcgcagtgggaacgatgccctcattcagcatttgcatggtttgttgaaaaccggacatggcactccagtcgccttcccgttccgctatcggctgaatttgattgcgagtgagatatttatgccagccagccagacgcagacgcgccgagacagaacttaatgggcccgctaacagcgcgatttgctggtgacccaatgcgaccagatgctccacgcccagtcgcgtaccgtcttcatgggagaaaataatactgttgatgggtgtc

SEQ ID NO: 280 - protein, 20 aa, Serratia entomophila
MPYSSASKAKATHSKATARD

SEQ ID NO: 281 - protein, 757 aa, Serratia entomophila; identical to SEQ ID NO: 99

SEQ ID NO: 282 - protein, 757 aa, Serratia entomophila; identical to SEQ ID NO: 99

SEQ ID NO: 283 - protein, 757 aa, Serratia entomophila; identical to SEQ ID NO: 99

SEQ ID NO: 284 - protein, 15 aa, synthetic construct
FNELNEKETRSKETC

SEQ ID NO: 285 - protein, 15 aa, synthetic construct
YSNSQRTPTQSTKNC

SEQ ID NO: 286 - protein, 14 aa, synthetic construct
ATASSLNQEPVETC

SEQ ID NO: 287 - protein, 15 aa, synthetic construct
SSESAEAETHSAETC

SEQ ID NO: 288 - protein, 15 aa, synthetic construct
KTPQLQLAIEEFNKC